(19) United States
(12) Patent Application Publication
(10) Pub. No.: US 2020/0407693 A1
(43) Pub. Date: Dec. 31, 2020

(54) METHOD FOR PRODUCING LOW-ANTIGENIC CELL

(71) Applicant: Kyoto University, Kyoto (JP)

(72) Inventors: Akitsu Hotta, Kyoto (JP); Huaigeng Xu, Kyoto (JP); Shin Kaneko, Kyoto (JP); Bo Wang, Kyoto (JP)

(21) Appl. No.: 16/969,222

(22) PCT Filed: Feb. 15, 2019
(86) PCT No.: PCT/JP2019/005524

§ 371 Date: Aug. 12, 2020

(30) Foreign Application Priority Data
Feb. 16, 2018 (JP) 2018-026421

(51) Int. Cl. C12N 5/074; C12Q 1/6881; C12N 15/11

(52) U.S. Cl. CPC C12N 5/0696; C12Q 1/6881; C12N 2501/24; C12N 2310/20; C12N 2501/25; C12N 15/11

(57) ABSTRACT

A method for producing, from a donor cell, a low-antigenic cell in which a rejection reaction is reduced in a case where the cell is allogeneically transplanted into a recipient, the method including: determining human leukocyte antigen (HLA) alleles for the donor cell and the recipient, respectively; specifying an HLA allele that is present in the donor cell but is not present in the recipient; and disrupting or modifying the specified HLA allele to obtain a cell population including a cell not expressing an HLA protein specific to the donor cell, in which the cell not expressing the HLA protein specific to the donor cell is the low-antigenic cell.

### TECHNICAL FIELD

[0001] The present invention relates to a method for producing a low-antigenic cell. More specifically, the present invention relates to a method for producing a low-antigenic cell, a kit for detecting a low-antigenic cell, a cell, a gRNA, and a method for specifying a target base sequence. Priority is claimed on Japanese Patent Application No. 2018-026421, filed Feb. 16, 2018, the content of which is incorporated herein by reference.

### BACKGROUND ART

[0002] In a case of allogeneic transplantation in which donor cells are transplanted into a recipient (patient) who is the other person, transplanted cells are rejected due to an immune reaction.

[0003] A protein that plays the most important role in distinguishing between self cells and non-self cells is a cell surface protein called a human leukocyte antigen (HLA) or a major histocompatibility complex (MHC).

[0004] HLA is classified into class I and class II. Class I HLA proteins are expressed in most cell types in a body. The class I HLA protein has a function of forming a heterodimer with β2-Microglobulin (B2M) to be expressed on a cell surface, and presenting a peptide with respect to CD8-positive cytotoxic T cells to induce activation. The antigenic peptides presented are endogenous and have a length of 8 to 10 amino acids in many cases.

[0005] Genes classified into class I HLA are mainly six genes of an HLA-A gene, an HLA-B gene, an HLA-C gene, an HLA-E gene, an HLA-F gene, and an HLA-G gene. In addition, many pseudogenes (HLA-H, HLA-J, HLA-K, HLA-L, HLA-P, HLA-T, HLA-U, HLA-V, HLA-W, HLA-X, HLA-Y, and the like) are also known. Among the genes, three genes of the HLA-A gene, HLA-B gene, and HLA-C gene have particularly great sequence diversity among individuals and play a major role in identifying self cells and non-self cells in transplantation immunity.

[0006] Class II HLA proteins are mainly expressed in immune cells such as macrophages, dendritic cells, activated T cells and B cells, and the like. The class II HLA protein has a function of forming a heterodimer with an a chain and a β chain and presenting a peptide with respect to CD4 helper T cells to induce activation. The antigenic peptides presented are exogenous and have a length of 15 to 24 amino acids in many cases.

[0007] Genes classified into class II HLA are HLA-DR (a chain: HLA-DRA, β chain: HLA-DRB), HLA-DQ (a chain: HLA-DQA1, β chain: HLA-DQB1), HLA-DP (a chain: HLA-DPA1 or HLA-DPA2, β chain: HLA-DPB1 or HLA-DPB2). In addition, many pseudogenes (HLA-DMA, HLA-DMB, HLA-DOA, HLA-DOB) are also known to exist.

[0008] HLA genes have sequence diversity and thus are involved in recognition of self and non-self cells at the cellular level. HLA matching is also particularly important for reducing immune rejection during allogeneic transplantation. For example, in transplantation of hematopoietic stein cells, it is recommended to find and transplant donors in which antigenicities in both alleles of HLA-A, HLA-B, HLA-C, and HLA-DR, that is, alleles at a total of 8 loci, are as consistent as possible.

[0009] In addition, in consideration of results of engraftment rates of kidney transplantation and the like, it has been reported that, as the degree of consistency of HLA antigenicity becomes high, engraftment efficiency becomes significantly high.

[0010] There is also an immune system induced by the absence of HLA antigens on a cell surface. NK cells express multiple inhibitory receptors. For example, it is known that a complex receptor of CD94 and NKG2A, which recognizes HLA-E and inhibits the action of NK cells, induces activation of NK cells when a cell without HLA-E is found, and attacks the cells. In addition, there is also a receptor family called Killer cell Immunoglobulin-like Receptor (KIR), which is classified into 2D and 3D according to the number of extracellular domains, and is also divided into L (long) and S (short) depending on lengths of intracellular domain. It is known that a 2DL1 receptor recognizes HLA-C2, 2DL2 and 2DL3 receptors recognize HLA-C1, a 2DL4 receptor recognizes HLA-G, a 3DL1 recognizes HLA-Bw4, and a 3DL2 recognizes HLA-A3 or HLA-A11 to inhibit activity of NK cells. There are polymorphisms in KIR, and for example, almost all Japanese (98% or more) have 2DL1, 2DL3, or 3DL4, but it has been reported that a proportion of persons having 2DL2 is about 15%, which is rare.

[0011] In addition, because pluripotent stem cells such as iPS cells and ES cells have pluripotency capable of differentiating into various cell types, cell therapy and regenerative medicine in which pluripotent stem cells are differentiated into various cells and then transplanted to patients are attracting attention.

[0012] There have been reported cases in which ES cells are differentiated into nerve cells and transplanted into a bone marrow injury patient, and cases in which iPS cells are differentiated into retinal pigment epithelial cells and transplanted into an age-related macular degeneration patient. It has been reported that, in a case of transplanting such pluripotent stem cell-derived cells, it is important to match transplanted cells with an HLA type of a patient.

[0013] However, pluripotent stein cells require a great deal of costs and time for establishment, and thus there is a problem in that it is difficult to prepare cells with matching HLA types for each patient. As one means for solving this problem, for example, Patent Literature 1 discloses cells deficient in a B2M gene required for displaying class I HLA proteins on a cell surface.

[0014] In recent years, by genome editing technology that uses CRISPR-Cas9 and guide RNA (gRNA), it became possible to insert an arbitrary DNA fragment by inducing double-stranded DNA breaks (Double strand break, DSB) in genomic DNA depending on target base sequences of gRNA to delete part of genomic DNA, and by co-introducing Cas9 and gRNA with a template DNA having a partially homologous sequence near the double-stranded DNA cleavage induction site.

[0015] However, DSB induction in the genome editing technique is determined by a spacer base sequence of about 20 bases of gRNA that recognizes and binds to a target sequence and by a base sequence called a PAM sequence of about 3 to 5 bases. Accordingly, unless a base sequence of gRNA matches a base sequence of a target site, efficient DSB induction is difficult.

[0016] In addition, a risk is known, in which, in a case where a base sequence that is very similar to a base sequence of a target site, for example, a base sequence that differs by only one base, is present outside the target site, it will induce a DSB to sites other than the target site due to errors, resulting in induction of undesired genomic sequence mutations.

### CITATION LIST

### Patent Literature

### [Patent Literature 1]

[0017] PCT International Publication No. WO2012/145384

### SUMMARY OF INVENTION

### Technical Problem

[0018] Because the cells disclosed in Patent Literature 1 are deficient in a B2M gene, class I HLA proteins are not displayed on the cell surface. Accordingly, it is considered that an immune reaction in the case where the cells are allogeneically transplanted is inhibited. However, in a case where an HLA protein is not displayed on the cell surface, an antigen-presenting ability of the cell is lost. In a case where the cell loses its antigen-presenting ability, a B2M-deficient cell cannot present virus- or tumor-derived antigens when they are infected with viruses or the like or when they become tumors, and as a result, there is a risk in which it may help growth of viruses and tumors. In addition, a cell in which an HLA protein is not presented on the cell surface is attacked by NK cells that recognize “missing self.”

[0019] Accordingly, it is possible to selectively disrupt only an arbitrary HLA gene by using the genome editing technique. However, there are multiple HLA genes, and there is a high degree of sequence homology between HLA genes, including many pseudogenes. In addition, because sequence diversity among individuals is large even with the same HLA genes, even when a target base sequence that matches a certain HLA gene sequence is identified, it cannot always be used in cells derived from other donors. For this reason, it is not easy to determine an appropriate target sequence for genome editing. Furthermore, in the genome editing technique of the related art, it takes a great deal of time to search for a cell in which a desired genome has been edited.

[0020] An object of the present invention is to provide a technique for producing a low-antigenic cell in which a rejection reaction is reduced in a case where the cell is allogeneically transplanted into a recipient.

### Solution to Problem

[0021] The present invention includes the following aspects.

[0022] [1] A method for producing, from a donor cell, a low-antigenic cell in which a rejection reaction is reduced in a case where the cell is allogeneically transplanted into a recipient, the method including: determining human leukocyte antigen (HLA) alleles for the donor cell and the recipient, respectively; specifying an HLA allele that is present in the donor cell but is not present in the recipient; and disrupting or modifying the specified HLA allele to obtain a cell population including a cell not expressing an HLA protein specific to the donor cell, in which the cell not expressing the HLA protein specific to the donor cell is the low-antigenic cell.

[0023] [2] The production method according to [1], in which the HLA allele determined in the determining the HLA alleles for the donor cell and the recipient, respectively, includes an HLA-A allele, an HLA-B allele, and an HLA-C allele.

[0024] [3] The production method according to [1] or [2], further including: recovering the cell not expressing the HLA protein specific to the donor cell from the cell population after the obtaining of the cell population including the cell not expressing the HLA protein specific to the donor cell, in which the recovering includes bringing the cell population into contact with an HLA protein expression-inducing agent, and recovering the cell not expressing the HLA protein specific to the donor cell from the cell population using, as an index, expression of the HLA protein specific to the donor cell in the cell population brought into contact with the HLA protein expression-inducing agent.

[0025] [4] The production method according to [3], in which the HLA protein expression-inducing agent is interferon (IFN)-γ, IFN-α, IFN-β, interleukin (IL)-4, granulocyte macrophage colony-stimulating factor (GM-CSF), transforming growth factor (TGF)-α, or TGF-β.

[0026] [5] The production method according to any one of [I] to [4], in which the low-antigenic cell is a pluripotent stem cell.

[0027] [6] A kit for detecting a low-antigenic cell in which a rejection reaction is reduced in a case where the cell is allogeneically transplanted into a recipient, the kit comprising an HLA protein expression-inducing agent.

[0028] [7] The kit according to [6], in which the HLA protein expression-inducing agent is IFN-γ, IFN-α, IFN-β, IL-4, GM-CSF, TGF-α, or TGF-β.

[0029] [8] The kit according to [6] or [7], in which the low-antigenic cell is a pluripotent stem cell.

[0030] [9] An HLA protein expression-inducing agent consisting of IFN-γ, IFN-α, IFN-β, IL-4, GM-CSF, TGF-α, or TGF-β.

[0031] [10] A cell in which at least one HLA allele is disrupted or modified and at least one kind of HLA protein can be expressed.

[0032] [11] The cell according to [10], in which the HLA allele includes an HLA-A allele, an HLA-B allele, or an HLA-C allele.

[0033] [12] The cell according to [10] or [11], which is a low-antigenic cell in which a rejection reaction is reduced in a case where the cell is allogeneically transplanted into a recipient, and in which the disrupted or modified HLA allele is an HLA allele that is not present in the recipient.

[0034] [13] The cell according to any one of [10] to [12], which is a pluripotent stem cell.

[0035] [14] The cell according to any one of [10] to [13], in which at least one allele of a class II major histocompatibility complex transactivator (CIITA) allele, a regulatory factor X5 (RFX5) allele, a regulatory factor X associated protein (RFXAP) allele, or a regulatory factor X associated ankyrin containing protein (RFXANK) allele is further disrupted or modified.

[0036] [15] The cell according to any one of [10] to [14], in which the HLA-A allele and the HLA-B allele are disrupted and at least one kind of HLA-C protein can be expressed.

[0037] [16] The cell according to [15], in which the HLA-C protein is a protein encoded by one kind of allele selected from the group consisting of an HLA-C*01:02 allele, an HLA-C*02:02 allele, an HLA-C*03:03 allele, an HLA-C*03:04 allele, an HLA-C*04:01 allele, an HLA-C*05:01 allele, an HLA-C*06:02 allele, an HLA-C*07:01 allele, an HLA-C*07:02 allele, an HLA-C*08:01 allele, an HLA-C*12:02 allele, and an HLA-C*16:01 allele.

[0038] [17] A method for producing, from a donor cell, a low-antigenic cell in which a rejection reaction is reduced in a case where the cell is allogeneically transplanted into a recipient, the method including: disrupting or modifying an allele including at least one of a CIITA allele, an RFX5 allele, an RFXAP allele, and an RFXANK allele of the donor cell, in which a cell in which the CIITA allele, the RFX5 allele, the RFXAP allele, or the RFXANK allele is disrupted or modified is the low-antigenic cell.

[0039] [18] A cell according to [17], in which the low-antigenic cell is a pluripotent stem cell.

[0040] [19] A cell in which an allele including at least one of a CIITA allele, an RFX5 allele, an RFXAP allele, and an RFXANK allele is disrupted or modified.

[0041] [20] The cell according to [19], which is a pluripotent stem cell.

[0042] [21] A gRNA targeting, as a target base sequence, a base sequence that is mapped to only one target HLA haplotype in a case where the base sequence is mapped to base sequence data of genomic DNA of all HLA haplotypes, but that is not mapped in a case where the base sequence is mapped to base sequence data of all genomic DNA except for HLA alleles.

[0043] [22] The gRNA according to [21], in which the target base sequence consists of a base sequence set forth in any of SEQ ID NOs: 3, 4, 7, 45 to 52, and 72 to 2459, or a base sequence in which one or several bases are deleted, substituted, or added at a 5′ end of a base sequence set forth in any of SEQ ID NOs: 3, 4, 7, 45 to 52, and 72 to 2459.

[0044] [23] The gRNA according to [21] or [22], in which the target base sequence consists of a base sequence set forth in any of SEQ ID NOs: 3, 4, 7, and 45 to 52, or a base sequence in which one or several bases are deleted, substituted, or added at a 5′ end of a base sequence set forth in any of SEQ ID NOs: 3, 4, 7, and 45 to 52.

[0045] [24] The gRNA according to any one of [21] to [23], in which the target base sequence is mapped to an exon 2 or 3 of an HLA gene.

[0046] [25] A gRNA targeting, as a target base sequence, a base sequence that is mapped to two or more target HLA haplotypes in a case where the base sequence is mapped to base sequence data of genomic DNA of all HLA haplotypes, but that is not mapped in a case where the base sequence is mapped to base sequence data of all genomic DNA except for HLA alleles.

[0047] [26] The gRNA according to [25], in which the target base sequence consists of a base sequence set forth in any of SEQ ID NOs: 53 to 55 and 2460 to 8013, or a base sequence in which one or several bases are deleted, substituted, or added at a 5′ end of a base sequence set forth in any of SEQ ID NOs: 53 to 55 and 2460 to 8013.

[0048] [27] The gRNA according to [25] or [26], in which the target base sequence consists of a base sequence set forth in any of SEQ ID NOs: 53 to 55, or a base sequence in which one or several bases are deleted, substituted, or added at a 5′ end of a base sequence set forth in any of SEQ ID NOs: 53 to 55.

[0049] [28] The gRNA according to any one of [25] to [27], in which the target base sequence is mapped to an exon 2 or 3 of an HLA gene.

[0050] [29] A method for specifying a target base sequence for producing, by genome editing, a low-antigenic cell in which a rejection reaction is reduced in a case where the cell is allogeneically transplanted into a recipient, the method including: mapping a candidate base sequence to base sequence data of genomic DNA of all HLA haplotypes; mapping the candidate base sequence to base sequence data of all genomic DNA except for HLA alleles; and specifying, as a target base sequence, the candidate base sequence that is mapped to only one target HLA haplotype in a case where the base sequence is mapped to base sequence data of genomic DNA of all HLA haplotypes, but that is not mapped in a case where the base sequence is mapped to base sequence data of all genomic DNA except for the HLA alleles.

[0051] [30] A method for specifying a target base sequence for producing, by genome editing, a low-antigenic cell in which a rejection reaction is reduced in a case where the cell is allogeneically transplanted into a recipient, the method including: mapping a candidate base sequence to base sequence data of genomic DNA of all HLA haplotypes; mapping the candidate base sequence to base sequence data of all genomic DNA except for HLA alleles; and specifying, as a target base sequence, the candidate base sequence that is mapped to two or more target HLA haplotypes in a case where the base sequence is mapped to base sequence data of genomic DNA of all HLA haplotypes, but that is not mapped in a case where the base sequence is mapped to base sequence data of all genomic DNA except for the HLA alleles.

### Advantageous Effects of Invention

[0052] According to the present invention, it is possible to provide a technique for producing a low-antigenic cell in which a rejection reaction is reduced in a case where the cell is allogeneically transplanted into a recipient.

### BRIEF DESCRIPTION OF DRAWINGS

[0053] FIG. 1(a) is a Venn diagram showing HLA alleles targeted by sgRNAs extracted in Experimental Example 1. FIG. 1(b) is a diagram showing which sites of an HLA-A allele, an HLA-B allele, and an HLA-C allele sgRNAs identified in Experimental Example 1 target.

[0054] FIG. 2 is a graph showing results of flow cytometry in Experimental Example 2.

[0055] FIG. 3 is a graph showing results of flow cytometry in Experimental Example 3.

[0056] FIG. 4(a) is a graph showing results of flow cytometry in Experimental Example 4. FIG. 4(b) is a diagram showing a schedule for an IFN-γ treatment of iPS cells and analysis of an expression level of an HLA-A protein in Experimental Example 4.

[0057] FIG. 5(a) is a diagram showing target bases and target sites of sgRNAs in Experimental Example 6. FIG. 5(b) is a photograph showing results of a T7 endonuclease I assay in Experimental Example 6.

[0058] FIG. 6(a) and FIG. 6(b) are graphs showing results of flow cytometry in Experimental Example 7.

[0059] FIG. 7 is a graph showing a proportion of base sequence mutation of each clone in Experimental Example 7.

[0060] FIG. 8(a) and FIG. 8(b) are graphs showing results of flow cytometry in Experimental Example 8.

[0061] FIG. 9(a) and FIG. 9(b) are graphs showing results of flow cytometry in Experimental Example 8.

[0062] FIG. 10(a) is a table showing a base mutation pattern of each clone recovered in Experimental Example 8. FIG. 10(b) shows a base sequence of a representative clone recovered in Experimental Example 8.

[0063] FIG. 11 is a graph showing results of flow cytometry in Experimental Example 9.

[0064] FIG. 12(a) is a table showing a base mutation pattern of each clone recovered in Experimental Example 9. FIG. 12(b) shows a base sequence of a representative clone recovered in Experimental Example 9.

[0065] FIG. 13(a) and FIG. 13(b) are tables showing a base mutation pattern of each clone recovered in Experimental Example 10. FIG. 13(c) shows a base sequence of a representative clone recovered in Experimental Example 10.

[0066] FIG. 14(a) is a table showing a base mutation pattern of each clone recovered in Experimental Example 11. FIG. 14(b) shows a base sequence of a representative clone recovered in Experimental Example 11.

[0067] FIG. 15(a) is a graph showing results of flow cytometry in Experimental Example 11. FIG. 15(b) is a table showing a base mutation pattern of each clone recovered in Experimental Example 11. FIG. 15(c) shows a base sequence of a representative clone recovered in Experimental Example 11.

[0068] FIG. 16(a) is a diagram showing target sites of sgRNAs in Experimental Example 12. FIG. 16(b) and FIG. 16(c) are graphs showing results of flow cytometry in Experimental Example 12.

[0069] FIG. 17(a) is a table showing a base mutation pattern of a clone recovered in Experimental Example 12. FIG. 17(b) shows a base sequence of a clone recovered in Experimental Example 12.

[0070] FIG. 18(a) is a graph showing results of flow cytometry in Experimental Example 13. FIG. 18(b) and FIG. 18(d) are tables showing a base mutation pattern of each clone recovered in Experimental Example 13. FIG. 18(c) and FIG. 18(e) show a base sequence of a representative clone recovered in Experimental Example 13.

[0071] FIG. 19(a) and FIG. 19(b) are graphs showing results of flow cytometry in Experimental Example 14. FIG. 19(c) is a table showing a base mutation pattern of each clone recovered in Experimental Example 14. FIG. 19(d) shows a base sequence of a representative clone recovered in Experimental Example 14.

[0072] FIG. 20(a) is a diagram showing target sites of sgRNAs in Experimental Example 15. FIG. 20(b) and FIG. 20(c) are graphs showing results of flow cytometry in Experimental Example 15.

[0073] FIG. 21(a) and FIG. 21(b) are schematic diagrams illustrating homologous recombination in Experimental Example 16. FIG. 21(c) is a graph showing results of flow cytometry in Experimental Example 15.

[0074] FIG. 22(a) and FIG. 22(b) are diagrams showing results of analysis of a base sequence in Experimental Example 16.

[0075] FIG. 23(a) and FIG. 23(b) are graphs showing results of flow cytometry in Experimental Example 17. FIG. 23(c) is a diagram showing results of analysis of a base sequence in Experimental example 17.

[0076] FIG. 24(a) is a graph showing results of flow cytometry in Experimental Example 18. FIG. 24(b) is a diagram showing results of analysis of a base sequence in Experimental example 18.

[0077] FIG. 25(a) to FIG. 25(e) are graphs showing results of flow cytometry in Experimental Example 19.

[0078] FIG. 26(a) to FIG. 26(f) are graphs showing results of flow cytometry in Experimental Example 20.

[0079] FIG. 27(a) to FIG. 27(e) are graphs showing results of flow cytometry in Experimental Example 21.

[0080] FIG. 28 is a schematic diagram showing a procedure of Experimental Example 22.

[0081] FIG. 29(a) to FIG. 29(e) are graphs showing results of flow cytometry in Experimental Example 22.

[0082] FIG. 30 is a schematic diagram showing a procedure of Experimental Example 23.

[0083] FIG. 31 is a graph showing results of Experimental Example 23.

[0084] FIG. 32 is a graph showing results of Experimental Example 24.

[0085] FIG. 33 is a graph showing results of Experimental Example 25.

[0086] FIG. 34(a) and FIG. 34(b) are graphs showing results of flow cytometry in Experimental Example 26. FIG. 34(c) is a graph showing results of Experimental Example 26.

[0087] FIG. 35(a) to FIG. 35(g) are graphs showing results of flow cytometry in Experimental Example 27.

[0088] FIG. 36 is a graph showing results of Experimental Example 28.

[0089] FIG. 37(a) to FIG. 37(f) are phase-contrast micrographs showing results of Experimental Example 29.

[0090] FIG. 38(a) to FIG. 38(f) are phase-contrast micrographs showing results of Experimental Example 30.

[0091] FIG. 39(a) and FIG. 39(b) are graphs showing results of flow cytometry in Experimental Example 31. FIG. 39(c) is a graph showing results of Experimental Example 31.

[0092] FIG. 40(a) and FIG. 40(b) are graphs showing results of flow cytometry in Experimental Example 32. FIG. 40(c) is a graph showing results of Experimental Example 32.

[0093] FIG. 41(a) is a diagram illustrating an experimental schedule in Experimental Example 33. FIG. 41(b) shows a photograph showing results of capturing fluorescence of EB-derived blood-cell-like cells in Experimental Example 33. FIG. 41(c) is a graph showing a survival rate of the EB-derived blood-cell-like cells in Experimental Example 33.

[0094] FIG. 42(a) is a graph showing results of flow cytometric analysis in Experimental Example 34. FIG. 42(b) is a graph showing results of Experimental Example 34.

[0095] FIG. 43(a) is a graph showing results of flow cytometric analysis in Experimental Example 35. FIG. 43(b) is a graph showing results of Experimental Example 35.

[0096] FIG. 44(a) and FIG. 44(b) are graphs showing results of flow cytometric analysis in Experimental Example 36.

[0097] FIG. 45(a) is a diagram illustrating an experimental schedule in Experimental Example 37. FIG. 45(b) shows a photograph showing results of capturing fluorescence of EB-derived blood-cell-like cells in Experimental Example 37. FIG. 45(c) is a graph showing a relative survival rate of the EB-derived blood-cell-like cells in Experimental Example 37.

[0098] FIG. 46 is a graph showing results of Experimental Example 38.

[0099] FIG. 47(a) is a table showing an HLA haplotype of 585A1-C7 residual cells used in Experimental Example 39, and an HLA haplotype of 585A1-C7 residual cells in which a CIITA gene was knocked out and which were produced in Experimental Example 39.

[0100] FIG. 47(b) is a table showing a base mutation pattern of each clone obtained in Experimental Example 39. FIG. 47(c) shows a base sequence of a representative clone obtained in Experimental Example 39.

[0101] FIG. 48(a) to FIG. 48(d) are graphs showing results of flow cytometry in Experimental Example 40.

[0102] FIG. 49(a) to FIG. 49(c) are graphs showing results of flow cytometry in Experimental Example 41.

[0103] FIG. 50(a) to FIG. 50(c) are diagrams illustrating a procedure of Experimental Example 42.

[0104] FIG. 51(a) is a graph showing results of flow cytometry in Experimental Example 42. FIG. 51(b) is a table showing a base mutation pattern of each subclone obtained in Experimental Example 42.

[0105] FIG. 52(a) and FIG. 52(b) are tables showing a base mutation pattern of each subclone obtained in Experimental Example 42.

[0106] FIG. 53 is a table showing allele frequency of an HLC-C allele in various races.

[0107] FIG. 54 is a table showing a base mutation pattern of each subclone obtained in Experimental Example 43.

[0108] FIG. 55 is a table showing a base mutation pattern of each subclone obtained in Experimental Example 44. FIG. 56(a) and FIG. 56(b) are graphs showing results of flow cytometry in Experimental Example 45.

[0109] FIG. 57 is a graph showing results of flow cytometry in Experimental Example 46.

[0110] FIG. 58 is a table showing a base mutation pattern of each subclone obtained in Experimental Example 47.

[0111] FIG. 59 is a table showing a base mutation pattern of each subclone obtained in Experimental Example 48.

[0112] FIG. 60 is a table showing a base mutation pattern of each subclone obtained in Experimental Example 49.

### DESCRIPTION OF EMBODIMENTS

### Method for Producing a Low-Antigenic Cell with Reduced Rejection Reaction

### First Embodiment

[0113] A production method of the first embodiment is a method for producing, from a donor cell, a low-antigenic cell in which a rejection reaction is reduced in a case where the cell is allogeneically transplanted into a recipient, the method including: (a) determining HLA alleles for the donor cell and the recipient, respectively; (b) specifying an HLA allele that is present in the donor cell but is not present in the recipient; and (c) disrupting or modifying the specified HLA allele to obtain a cell population including a cell not expressing an HLA protein specific to the donor cell, in which the cell not expressing the HLA protein specific to the donor cell is the low-antigenic cell.

[0114] As described below in Examples, according to the production method of the first embodiment, it is possible to produce low-antigenic cells with reduced rejection reaction (graft-versus-host disease) when the cells are allogeneically transplanted into a recipient. Furthermore, as will be described later in Examples, low-antigenic cells produced by the production method of the first embodiment are less likely to be attacked by NK cells of a recipient even in a case where the cells are allogeneically transplanted into the recipient.

[0115] In the present specification, an HLA genetic locus may be referred to as an “HLA allele”, and antigenic diversity of HLA proteins displayed on a cell surface may be referred to as an “HLA type.” Hereinafter, each of the steps will be described.

### (Step (a))

[0116] In the present step, HLA alleles of a donor cell and a recipient are respectively determined. The donor cell may be a human cell or a non-human animal cell. Furthermore, the donor cell may be a pluripotent stem cell or a differentiated cell. In the present specification, pluripotent stem cells mean embryonic stem cells (ES cells), induced pluripotent stem cells (iPS cells), and the like.

[0117] Furthermore, low-antigenic cells produced by the production method of the first embodiment are cells in which an HLA allele of donor cells has been disrupted or modified. Accordingly, the low-antigenic cell may be a pluripotent stem cell similar to the donor cell, or may be a differentiated cell.

[0118] Furthermore, a recipient is preferably an animal of the same species as the low-antigenic cells. The recipient may be a patient who is actually scheduled for transplantation, or may be a recipient having a hypothetical HLA allele that can be a recipient in the future.

[0119] HLA alleles can be determined by methods of the related art such as a PCR-rSSO method (PCR-reverse Sequence Specific Oligonucleotide), a PCR-SSP (Sequence specific primer) method, a PCR-SBT (Sequence based typing) method, and a next-generation sequencing method, and the determination can be carried out using a commercially available HLA typing kit or the like. In addition, HLA reporter, HLA-PRG, hla-genotyper, PHLAT, Optitype, neXtype, Athlates, HLAforest, SOAP-HLA, HLAminer, seq2HLA, GATK HLA Caller, and the like are known as software for performing HLA typing from sequence data of next-generation sequencers such as whole genome sequence (WGS), exome sequence (WES), and RNA-seq.

[0120] The HLA allele determined in the present step is preferably an HLA allele highly relevant to a rejection reaction upon cell transplantation, and preferably includes an HLA-A allele, an HLA-B allele, and an HLA-C allele.

[0121] The HLA allele determined in the present step may further include an HLA-DR allele, an HLA-DQ allele, and an HLA-DP allele, and may further include other HLA alleles.

### (Step (b))

[0122] In the present step, an HLA allele not present in a recipient but present in donor cells (hereinafter, may be referred to as “donor-specific HLA allele”) is specified. Donor-specific HLA alleles can be specified by comparing an HLA allele of donor cells and an HLA allele of a recipient.

[0123] The HLA allele is a base sequence encoded on genomic DNA and encodes the HLA protein. Serological classification of HLA proteins is called HLA serotype. Examples of methods for identifying an HLA serotype include a method of analyzing reactivity with a serum or an antibody that recognizes a specific HLA serotype; a method of collating a base sequence of DNA of an HLA allele or an RNA transcribed from the HLA allele with existing correspondence tables, IPD-IMGT database (https://www.ebi.ac.uk/ipd/imgt/h1a/), and the like; and the like.

[0124] The HLA serotype generally refers to a difference in a first section (two-digit notation) of the HLA allele notation (http://hla.alleles.org/nomenclature/naming.html), but in the present specification, even in a case where an HLA serotype is the same serologically, in a case where amino acid sequences are different (non-synonymous substitution), it is determined that HLA alleles are different HLA alleles.

[0125] Specifically, it is determined whether alleles are the same HLA alleles or different HLA alleles from a difference between the first section and the second section (four-digit notation) in the HLA allele notation. Then, it is determined that whether HLA alleles in which the first section and the second section indicated by the HLA allele notation are the same HLA alleles. Furthermore, in a case where it is necessary to distinguish base sequences of genome such as in a case of determining a target sequence for genome editing, differences in the third section (a base substitution in a translation region not associated with an amino acid mutation) and the fourth section (a base substitution outside the translation region) may also be considered.

### (Step (c))

[0126] In a case where cells having an HLA protein of an HLA serotype that are not present in a recipient are allogeneically transplanted into the recipient, a rejection reaction occurs, and thereby the transplanted cells are rejected. Accordingly, in the present step, a cell population is obtained, which contains cells that disrupt or modify the donor-specific HLA allele and do not express the donor cell-specific HLA protein (hereinafter, also referred to as “donor-specific HLA protein”).

[0127] A cell that does not express a donor-specific HLA protein refers to a cell in which the expression of a specific HLA protein is negative due to the disruption of an HLA allele of donor cells, or a cell changed from a specific HLA type to another HLA type by modifying the HLA allele of the donor cells.

[0128] A cell that does not express the donor-specific HLA protein obtained in the present step is a low-antigenic cell. In a case where the donor-specific HLA protein is not present, the present step is unnecessary.

[0129] It is preferable that a B2M gene be not disrupted in low-antigenic cells produced by the production method of the first embodiment. As a result, a class I HLA protein is present on a cell surface, and even in a case where low-antigenic cells are allogeneically transplanted into a recipient, the cells are less likely to be attacked by NK cells of the recipient. In addition, because only part of HLA is disrupted and the remaining HLA retains an antigen-presenting ability, the antigen-presenting ability can be maintained even in a case where the cell is infected with a virus or becomes a tumor.

### <Genome Editing>

[0130] As will be described later in Examples, disruption or modification of HLA alleles of donor cells can be performed by, for example, genome editing. Disruption of HLA alleles can be performed by specifically cleaving the HLA alleles and inducing double-stranded DNA break (DSB). In a case where a base is deleted or added to cause a frameshift mutation in a DSB repairing process, HLA alleles are disrupted, and thereby an HLA protein is not expressed. In the present specification, disruption of the HLA alleles may be referred to as knockout of the HLA alleles.

[0131] Furthermore, by specifically cleaving the HLA alleles in the presence of donor DNA and inducing DSB, it is possible to induce homologous recombination in the DSB repairing process and modify the HLA alleles. Specifically, for example, an HLA-A*02:07 allele can be modified to an HLA-A*01:01 allele, as will be described later in Examples.

[0132] As the donor DNA, donor DNA having a sequence identity with a region including before and after a position of double-stranded DNA cleavage of genomic DNA and encoding a desired HLA allele may be used. The donor DNA may be single-stranded DNA or double-stranded DNA. The donor DNA may be a DNA having a single base sequence or a mixture of DNAs having a plurality of base sequences.

[0133] The phrase “having a sequence identity” means that 90% or more of base sequences match a region including double-strand break positions of donor DNA and target genomic DNA. In the donor DNA, 95% or more of base sequences preferably match and 99% or more of base sequences more preferably match the region including the double-strand break positions in the genomic DNA.

[0134] The donor DNA may be single-stranded DNA of about 50 to 5,000 bases or double-stranded DNA of about 50 to 5,000 base pairs. In a case where the donor DNA is single-stranded DNA, the donor DNA may have sequence identity with any of the double strands of genomic DNA.

### <Sequence-Specific DNA-Cleaving Enzyme>

[0135] In general, sequence-specific DNA-cleaving enzymes used for inducing DSB to perform genome editing are roughly classified into RNA-induced nucleases and artificial nucleases. The sequence-specific DNA-cleaving enzyme may be an RNA-induced nuclease or an artificial nuclease.

[0136] The sequence-specific DNA-cleaving enzyme is not particularly limited as long as it cleaves genomic DNA in a target sequence-specific manner to form a double-strand break. A length of a target sequence recognized by the sequence-specific DNA-cleaving enzyme may be, for example, about 10 to 60 bases.

[0137] Furthermore, the sequence-specific DNA-cleaving enzyme may be, for example, in a form in which a plurality of nickases are combined to cleave DNA. The nickase means an enzyme that forms a nick in a single strand of double-stranded DNA. For example, a double-strand break can be formed by forming nickases at both strands of double-stranded DNA at close locations on genomic DNA.

[0138] The RNA-induced nuclease is an enzyme that guides a short-chain RNA that binds to a target sequence and recruits a nuclease having two DNA cleavage domains (nuclease domains) to induce sequence-specific cleavage. Examples of RNA-induced nucleases include CRISPR-Cas family proteins. The CRISPR-Cas family proteins are roughly classified into class 1 and class 2. Class 1 includes type I, type III, and type IV, and class 2 includes type II, type V, and type VI.

[0139] Examples of CRISPR-Cas family protein include Cas9, Cpf1, CasX, CasY, Cas12, Cas13, C2C2, and the like. The RNA-derived nuclease may be a homologue of a CRISPR-Cas family protein or a modified CRISPR-Cas family protein. For example, it may be a nickase-modified nuclease in which one of two existing wild-type nuclease domains is modified to be inactive. Alternatively, it may be Cas9-HF, HiFi-Cas9, eCas9, or the like having improved target specificity.

[0140] Examples of Cas9 include those derived from Pseudomonas aeruginosa, Staphylococcus aureus, Streptococcus thermophilus, Geobacillus stearothermophilus, and the like. Examples of Cpf1 include those derived from Acidaminococcus, Lachnospira, Chlamydomonas, Francicella-Novicida, and the like.

[0141] The artificial nuclease is an artificial restriction enzyme having a DNA binding domain designed/produced to specifically bind to a target sequence and a nuclease domain (such as a DNA cleavage domain of Fold which is a restriction enzyme). Examples of artificial nucleases include Zinc finger nuclease (ZFN), Transcription activator-like effector nuclease (TALEN), meganucleases, and the like, but examples are not limited thereto.

### <<Introduction of Sequence-Specific DNA-Cleaving Enzyme>>

[0142] For example, in a case where CRISPR-Cas is used as the sequence-specific DNA-cleaving enzyme introduced into donor cells, a target base sequence is determined by gRNA. Details of gRNA will be described later. A gRNA may be introduced into donor cells in the form of RNA, or may be introduced into the donor cells in the form of an expression vector and expressed intracellularly.

[0143] Examples of methods of preparing a gRNA in the form of RNA include a method of producing a construct in which a promoter such as T7 is added upstream of a nucleic acid fragment encoding gRNA, and synthesizing by an in vitro transcription reaction; a method of chemical synthesis; and the like. In the case of chemically synthesizing gRNA, chemically modified RNA may be used.

[0144] Examples of expression vectors include a plasmid vector or a viral vector which transcribes gRNA from Pol 111 promoter such as H1 promoter or U6 promoter. In a case where gRNA is expressed using an expression vector, gRNA may be expressed constitutively or may be expressed under the control of an expression-inducible promoter.

[0145] Subsequently, Cas9 is prepared. Cas9 may be introduced into donor cells in the form of an expression vector that is expressed from a Pol II promoter, or may be introduced into the donor cells in the form of a purified protein. Examples of expression vectors include transposon vectors, virus vectors, episomal vectors, plasmid vectors, and the like.

[0146] In introduction of gRNA and Cas9 into donor cells, in a case where the gRNA and Cas9 are in the form of a viral vector, it is sufficient for the gRNA and Cas9 be added to a medium of the donor cells. Examples of viral vectors include adeno-associated virus vectors, adenovirus vectors, retrovirus vectors, lentivirus vectors, Sendai virus vectors, baculovirus vectors, and the like.

[0147] In a case where gRNA and Cas9 are transposon vectors, episomal vectors, plasmid vectors, or the like, or in a case where the gRNA is RNA and the Cas9 is a purified protein, they may be introduced into donor cells by a transfection reagent or an electroporation method.

[0148] As the transfection reagent, for example, it is possible to use Lipofectamine 2000, Lipofectamine 3000, CRISPRMAX, and RNAMAX (all of which are from Thermo Fisher Scientific); FuGENE 6 and FuGENE HD (both are from Promega); and the like.

[0149] In addition, the electroporation method can be performed using a device such as NEPA21 (Neppagene Co., Ltd.), Neon (Thermo Fisher Scientific), and 4D-Nucleofector (Lonza Co., Ltd.).

### (Step (d))

[0150] In the step (c), it is possible to obtain the cell population which includes low-antigenic cells and which does not express a donor-specific HLA protein. However, the cell population obtained in step (c) may include, in addition to cells (low-antigenic cells) in which desired HLA alleles are disrupted or modified, cells in which HLA alleles are not disrupted or modified, cells in which HLA alleles are not completely disrupted or modified, and the like. Accordingly, after the step (c), a step (d) of recovering cells (low-antigenic cells) that do not express the donor-specific HLA protein may be further performed.

[0151] The step (d) includes step of bringing the cell population including low-antigenic cells into contact with an agent for inducing HLA protein expression (HLA protein expression-inducing agent), and recovering the cell not expressing the HLA protein specific to the donor cell from the cell population using, as an index, expression of the HLA protein specific to the donor cell in the cell population brought into contact with the HLA protein expression-inducing agent. The step of bringing the HLA protein expression-inducing agent into contact with the cell population can be performed, for example, by adding the HLA protein expression-inducing agent to a medium of the cell population.

[0152] In the present step, to recover cells that do not express the donor-specific HLA protein from the cell population using the expression of the donor-specific HLA protein as an index means to detect the presence of the expressed HLA protein, to detect the presence or absence of the expressed HLA protein, and to recover cells that do not express the donor-specific HLA protein.

[0153] Examples of HLA protein expression-inducing agents include cytokines such as IFN-γ, IFN-α, IFN-β, IL-4, GM-CSF, TGF-α, and TGF-β. These expression-inducing agents may be used alone or in combination of two or more kinds thereof.

[0154] In a case where the above-mentioned cytokines are used in human cells, the cytokines are preferably human-derived cytokines. The NCBI accession numbers of human IFN-γ protein are NP_000610.2 and the like. The NCBI accession numbers of human IFN-α protein are NP_076918.1, NP_000596.2, NP_066546.1, and the like. The NCBI accession numbers of human IFN-β protein are NP_002167.1 and the like. The NCBI accession numbers of human IL-4 protein are NP_000580.1, NP_758858.1, NP_001341919.1, and the like. The NCBI accession numbers of human GM-CSF protein are NP_000749.2, and the like. The NCBI accession numbers of human TGF-α protein are NP_001093161.1, NP_003227.1, NP_001295088.1, NP_001295087.1, and the like. The NCBI accession numbers of human TGF-β protein are NP_000651.3, XP_011525544.1, and the like.

[0155] The above-mentioned cytokine may have a mutation in an amino acid sequence described in each of the above-mentioned accession numbers as long as it has an activity of inducing the expression of HLA protein. More specifically, it may have an amino acid sequence in which one or several amino acids are deleted, substituted, or added in an amino acid sequence described in each of the above accession numbers. One or several amino acids may be, for example, 1 to 10 amino acids, for example, 1 to 5 amino acids, and for example, 1 to 3 amino acids. The above-mentioned cytokine may further have an amino acid sequence from which a signal peptide has been removed.

[0156] It is known that pluripotent stem cells generally do not express the HLA protein on the cell surface in an undifferentiated state, and therefore it is difficult to detect the HLA protein. In order to display the HLA protein, it is necessary to induce differentiation. However, a differentiation induction process is generally complicated and time consuming. In addition, because cells that have once been differentiation-induced do not spontaneously return to an undifferentiated state, even in a case where an HLA protein-negative differentiated cell population is recovered, it is no longer a pluripotent stem cell.

[0157] The inventors of the present invention have revealed that it is possible induce the expression of HLA protein while maintaining pluripotency of pluripotent stem cells by causing the above-mentioned HLA protein expression-inducing agent to act on pluripotent stem cells.

[0158] Accordingly, the expression of the HLA protein in the cell population obtained in the step (d) is induced, and thereby pluripotent stem cells (low-antigenic cells) in which desired HLA alleles are disrupted or modified can be efficiently detected and recovered.

[0159] For example, after inducing the expression of HLA protein in cells, by staining the cells with an anti-HLA protein antibody, it is possible to distinguish HLA-expressing cells or HLA-non-expressing cells with a flow cytometer and recover them by sorting.

[0160] Alternatively, an anti-HLA protein antibody may be adsorbed on magnetic beads and brought into contact with HLA protein-expressing cells. Then, the cells to which the magnetic beads are bonded can be recovered using magnetic force.

[0161] Alternatively, cells expressing a specific HLA protein on a culture dish are labeled with an anti-HLA protein antibody or the like, unnecessary undesired cells are removed by suction or laser irradiation, and thereby only target low-antigenic cells may be recovered.

[0162] Alternatively, HLA protein-expressing cells on a culture dish are mixed with T cells that recognize an undesired HLA protein, only cells expressing the undesired HLA protein are attacked and removed, and thereby only target low-antigenic cells may be recovered.

[0163] The production method of the first embodiment may further include a step of disrupting or modifying an allele including at least one allele of a CIITA allele, an RFX5 allele, an RFXAP allele, and an RFXANK allele of the donor cell. A CIITA gene is a gene encoding a Class II Major Histocompatibility Complex Transactivator protein. Furthermore, an RFX5 gene is a gene encoding a Regulatory Factor X5 protein. Furthermore, an RFXAP gene is a gene encoding a Regulatory Factor X Associated Protein. Furthermore, an RFXANK gene is a gene encoding a Regulatory Factor X Associated Ankyrin Containing Protein.

[0164] The CIITA gene, together with the RFX5 gene, the RFXAP gene, and the RFXANK gene, encodes a transcription factor that controls transcriptional activation of HLA class II. Accordingly, for cells in which at least one of the CIITA allele, the RFX5 allele, the RFXAP allele, and the RFXANK allele is disrupted do not express the HLA class II protein, a rejection reaction in a case where the cells are allogeneically transplanted into a recipient is further reduced.

[0165] The NCBI accession numbers of the human CIITA gene are NM_000246.3., NM_001286402.1, NM_001286403.1, and the like. The NCBI accession numbers of human RFX5 gene are NM_000449.3, NM_001025603.1, and the like. The NCBI accession numbers of the human RFXAP gene is NM_000538.3, and the like. The NCBI accession numbers of the human RFXANK gene are NM_001278727.1, NM_001278728.1, NM_003721.3, NM_134440.2, and the like.

### Second Embodiment

[0166] A production method according to a second embodiment is a method for producing, from a donor cell, a low-antigenic cell in which a rejection reaction is reduced in a case where the cell is allogeneically transplanted into a recipient, the method including: disrupting or modifying an allele including at least one of a CIITA allele, an RFX5 allele, an RFXAP allele, and an RFXANK allele of the donor cell, in which a cell in which an allele including at least one of the CIITA allele, the RFX5 allele, the RFXAP allele, or the RFXANK allele is disrupted or modified is the low-antigenic cell. The production method of the present embodiment mainly differs from the production method of the first embodiment described above in that HLA alleles are not disrupted.

[0167] As described above, expression of the CIITA gene, the RFX5 gene, the RFXAP gene, and the RFXANK gene is known to be essential for expression of class II HLA protein. Accordingly, for cells in which at least one of the CIITA allele, the RFX5 allele, the RFXAP allele, and the RFXANK allele is disrupted do not express the HLA class II protein, a rejection reaction in a case where the cells are allogeneically transplanted into a recipient is reduced.

[0168] In the production method of the second embodiment, donor cells may be pluripotent stem cells similar to those described above, or may be differentiated cells.

[0169] Furthermore, a recipient is preferably an animal of the same species as the low-antigenic cells. The recipient may be a patient who is actually scheduled for transplantation, or may be a recipient having a hypothetical HLA allele that can be a recipient in the future.

[0170] Furthermore, as described above, cells in which a B2M allele is disrupted do not express an HLA class 1 protein even in a case where an HLA allele is wild type. The production method of the second embodiment may further include a step of disrupting a B2M allele of a donor cell.

[0171] Disruption of the CIITA allele or the B2M allele of the donor cell can be performed by, for example, genome editing. The genome editing is the same as described above.

### [Kit for Detecting Low-Antigenic Cell]

[0172] In one embodiment, the present invention provides a kit for detecting a low-antigenic cell in which a rejection reaction is reduced in a case where the cell is allogeneically transplanted into a recipient, the kit including an HLA protein expression-inducing agent. Low-antigenic cells can be detected and recovered by the kit of the present embodiment. Accordingly, it can be said that the kit of the present embodiment is a kit for recovering low-antigenic cells.

[0173] In the kit of the present embodiment, an HLA protein expression-inducing agent is the same as described above, and examples thereof include cytokines such as IFN-γ, IFN-α, IFN-β, IL-4, GM-CSF, TGF-α, and TGF-β. The kit of the present embodiment may include one of these expression-inducing agent alone or may include two or more kinds thereof.

[0174] In the kit of this embodiment, low-antigenic cells may be pluripotent stem cells. As will be described later in Examples, according to the kit of the present embodiment, even in a case where low-antigenic cells are pluripotent stem cells, expression of the HLA protein is induced while still maintaining pluripotency of the low-antigenic cells.

### Cell

### First Embodiment

[0175] A cell according to the first embodiment is a cell in which at least one HLA allele is disrupted or modified and at least one kind of HLA protein can be expressed. The cell of the first embodiment may be a pluripotent stem cell or a differentiated cell. In the cell of the first embodiment, at least one HLA allele that has been disrupted or modified is preferably a class 1 HLA allele.

[0176] Pluripotent stem cells generally have weak expression of HLA protein. The term “weak expression” means that, for example, expression of the HLA protein cannot be clearly detected even though cells are stained with an anti-HLA protein antibody and subjected to flow cytometric analysis.

[0177] However, as will be described later in Examples, in a case where the HLA protein expression-inducing agent is brought into contact with pluripotent stem cells, expression of an HLA protein is enhanced. In the cell of the first embodiment, the phrase “capable of expressing at least one HLA protein” means that the cell is a cell in which expression of the HLA protein is enhanced by bringing the HLA protein expression-inducing agent into contact with the cells even in a case where the cell is a cell in which expression of the HLA protein generally usually weak, such as pluripotent stem cells. Furthermore, the cell of the first embodiment may be a differentiated cell in which the HLA protein is expressed.

[0178] As will be described later in Examples, for example, cells in which a B2M allele is disrupted do not express an HLA class I protein even in a case where an HLA allele is wild type. The cell of the first embodiment do not include such cells.

[0179] In the cell of the first embodiment, a disrupted or modified HLA allele preferably includes a class I HLA allele, and preferably includes an HLA-A allele, an HLA-B allele, or an HLA-C allele.

[0180] Since the cell of the first embodiment expresses the at least one class 1 HLA protein, the cell is less likely to be attacked by NK cells of a recipient even in a case where the cell is allogeneically transplanted into the recipient. The at least one class I HLA protein includes an HLA-C protein, an HLA-E protein, an HLA-G protein, and the like. In the cell of the first embodiment, because only part of HLA is disrupted and the remaining HLA retains an antigen-presenting ability, the antigen-presenting ability can be maintained even in a case where the cell is infected with a virus or becomes a tumor.

[0181] The cell of the first embodiment may be a low-antigenic cell in which a rejection reaction is reduced in a case where the cell is allogeneically transplanted into a recipient, in which the disrupted or modified HLA allele is an HLA allele that is not present in the recipient. In the above-mentioned low-antigenic cell, a rejection reaction is reduced in a case where the cells is allogeneically transplanted to a recipient.

[0182] The low-antigenic cell of the first embodiment is preferably a cell of the same species as a recipient, and may be a human cell or a non-human animal cell. The recipient may be a patient who is actually scheduled for transplantation, or may be a recipient having a hypothetical HLA allele that can be a recipient in the future.

[0183] In the cell of the first embodiment, an allele including at least one of a CIITA allele, an RFX5 allele, an RFXAP allele, and an RFXANK allele may be further disrupted or modified. As described above, expression of the CIITA gene, the RFX5 gene, the RFXAP gene, and the RFXANK gene is known to be essential for expression of class II HLA protein. Accordingly, for cells in which at least one of the CIITA allele, the RFX5 allele, the RFXAP allele, and the RFXANK allele is disrupted do not express the HLA class II protein, a rejection reaction in a case where the cells are allogeneically transplanted into a recipient is further reduced.

### Second Embodiment

[0184] A cell according to the second embodiment is a cell in which an allele including at least one of a CIITA allele, an RFX5 allele, an RFXAP allele, and an RFXANK allele is disrupted or modified. As described above, a cell, in which an allele including at least one of the CIITA allele, the RFX5 allele, the RFXAP allele, and the RFXANK allele is disrupted or modified do not express the HLA class II protein, is a low-antigenic cell in which a rejection reaction in a case where the cell is allogeneically transplanted into a recipient is reduced.

[0185] The cell according to the second embodiment may express an HLA class I protein. The cell of the second embodiment may be useful for allogeneic transplantation into a recipient.

[0186] The cell of the second embodiment may be a pluripotent stem cell or a differentiated cell. Furthermore, as described above, cells in which a B2M allele is disrupted do not express an HLA class I protein even in a case where an HLA allele is wild type. In the cell of the second embodiment, a B2M allele may be further disrupted in addition to the at least one of the CIITA allele, the RFX5 allele, the RFXAP allele, and the RFXANK allele.

[0187] A low-antigenic cell of the second embodiment is preferably a cell of the same species as a recipient, and may be a human cell or a non-human animal cell. The recipient may be a patient who is actually scheduled for transplantation, or may be a recipient having a hypothetical HLA allele that can be a recipient in the future.

### (Usage Applications of Low-Antigenic Cells)

[0188] The cells of the first embodiment and the second embodiment described above are low-antigenic cells in which a rejection reaction in a case where the cells are allogeneically transplanted into a recipient is reduced. Accordingly, the cells can be used for cell therapy and regenerative medicine.

[0189] In a case where low-antigenic cells are pluripotent stem cells, for example, the cells may be differentiated into nerve cells, hepatocytes, pancreatic islet cells, cardiomyocytes, kidney cells, hematopoietic stem cells, cytotoxic T cells, and the like, and then the cells may be transplanted into a patient.

[0190] Alternatively, the low-antigenic cells may be introduced into a patient after gene transfection. For example, after differentiation of pluripotent stein cells into T cells, gene transfection of a chimeric antigen receptor (CAR) is performed, and transplantation into cancer patients as CAR-T cells is performed.

### Method of Specifying Target Base Sequence

### First Embodiment

[0191] In one embodiment, the present invention provides a method for specifying a target base sequence for producing, by genome editing, a low-antigenic cell in which a rejection reaction is reduced in a case where the cell is allogeneically transplanted into a recipient, the method including: mapping a candidate base sequence to base sequence data of genomic DNA of all HLA haplotypes; mapping the candidate base sequence to base sequence data of all genomic DNA except for HLA alleles; and specifying, as a target base sequence, the candidate base sequence that is mapped to only one target HLA haplotype in a case where the base sequence is mapped to base sequence data of genomic DNA of all HLA haplotypes, but that is not mapped in a case where the base sequence is mapped to base sequence data of all genomic DNA except for the HLA alleles.

[0192] By the method of the first embodiment, a target base sequence of the gRNA of the first embodiment to be described later can be specified. As described below, the gRNA of the first embodiment can specifically induce DSB in an HLA haplotype-specific manner, which makes the risk of off-target mutation introduction low.

[0193] As described above, an HLA gene has many pseudogenes, HLA gene sequences are highly homologous to each other, and sequence diversity among individuals is large. Accordingly, it is not easy to determine an appropriate target base sequence for genome editing using a sequence-specific DNA-cleaving enzyme.

[0194] A target base sequence of a sequence-specific DNA-cleaving enzyme specific to an HLA gene can be specified, for example, as follows. First, base sequence data of genomic DNA of all HLA haplotypes (base sequence data of all known HLA genes) is obtained. The base sequence data of all HLA genes can be obtained from, for example, IPD-IMGT/HLA database (https://www.ebi.ac.uk/ipd/imgt/h1a/). As of July 2017, 12,544 base sequences of HLA class I genes and 4,622 base sequences of HLA class II genes have been registered in the present database.

[0195] Subsequently, a base sequence which is a target of a sequence-specific DNA-cleaving enzyme to be used is extracted from a base sequence of each HLA allele. For example, in a case where CRISPR-Cas is used as a sequence-specific DNA-cleaving enzyme, a base sequence, which includes a PAM sequence of about 3 to 5 bases (for example, “NGG” for Cas9 derived from Streptococcus pyogenes, “TTTN” for Cpf1 derived from Acidaminococcus) and which is usable as a target base sequence of gRNA, is extracted as a candidate base sequence.

[0196] In the method of the present embodiment, a target base sequence is assumed to include the PAM sequence. A length of the target base sequence including the PAM sequence varies depending on sequence-specific DNA-cleaving enzymes. For example, in a case where a sequence-specific DNA-cleaving enzyme is Cas 9 derived from Pseudomonas aeruginosa, a length of the target base sequence including the PAM sequence is preferably 19 to 33 bases, and is more preferably 20 to 24 bases. Furthermore, in a case where a sequence-specific DNA-cleaving enzyme is Cpf1 derived from Acidaminococcus, a length of the target base sequence including the PAM sequence is preferably 20 to 34 bases, and more preferably about 24 bases.

[0197] Subsequently, a candidate base sequence including the PAM sequence is mapped to the base sequence data of the genomic DNA of all HLA haplotypes.

[0198] Mapping refers to an operation of specifying a position having high sequence identity in a query base sequence (meaning a candidate base sequence herein) on a reference base sequence (meaning base sequence data of genomic DNA of all HLA haplotypes herein). A sequence identity between the query base sequence and the reference base sequence is preferably 90% or more, more preferably 95% or more, even more preferably 99% or more, and particularly preferably 100%.

[0199] The sequence identity of the query base sequence with respect to the reference base sequence can be determined as follows, for example. First, the reference base sequence and the query base sequence are aligned. Subsequently, the number of bases of matched bases in the reference base sequence and the query base sequence can be calculated, and a sequence identity can be determined according to Formula (1).

Sequence identity (%)=number of matched bases/total number of bases in query base sequence×100 (1)

[0200] As will be described later in Examples, mapping can be performed using, for example, a Bowtie program (http://bowtie-bio.sourceforge.net/index.shtml). In addition, mapping may be performed using a sequence homology (sequence identity) search program other than the Bowtie program, such as BWA, BLAST, BLAT, SOAP, Novoalign, and TopHat.

[0201] Subsequently, the candidate base sequence is mapped to base sequence data of all genomic DNA except for HLA alleles. A reference human genome sequence (Hg19) or the like can be used as base sequence data of total genomic DNA. In addition, for mapping, the Bowtie program or a sequence homology search program other than the Bowtie program can be used.

[0202] Subsequently, a candidate base sequence, that is mapped to only one target HLA haplotype in a case where the base sequence is mapped to base sequence data of genomic DNA of all HLA haplotypes, but that is not mapped in a case where the base sequence is mapped to base sequence data of all genomic DNA except for HLA alleles, is specified as a target base sequence. The target HLA haplotype means a target HLA haplotype to be disrupted or modified.

[0203] As will be described later in Examples, a gRNA targeting the target base sequence specified by the method of the first embodiment as a target base sequence (the gRNA of the first embodiment to be described later) can induce a DSB specific to a target specific HLA haplotype, which makes the risk of off-target mutagenesis low.

[0204] Even though an HLA gene is composed of eight exons in many cases, the target base sequence preferably targets a protein coding region of the HLA gene. The target base sequence preferably targets an exon 1, 2, 3, or 4 encoding an extracellular domain of the HLA protein, and particularly preferably targets the exon 2 or 3.

[0205] Alternatively, in a case where the target base sequence is set at two positions, a base sequence between therebetween can be largely deleted. In order to utilize this deletion, two or more target base sequences may be designed to include a gene region encoding a protein of HLA gene.

[0206] Furthermore, the target base sequence preferably does not target other genomic regions other than the HLA gene or mitochondrial DNA. Furthermore, even in a case where a mismatch of several bases is allowed, it is preferable to select a target base sequence that has few sites targeting regions other than the HLA gene.

### Second Embodiment

[0207] In one embodiment, the present invention provides a method for specifying a target base sequence for producing, by genome editing, a low-antigenic cell in which a rejection reaction is reduced in a case where the cell is allogeneically transplanted into a recipient, the method including: mapping a candidate base sequence to base sequence data of genomic DNA of all HLA haplotypes; mapping the candidate base sequence to base sequence data of all genomic DNA except for HLA alleles; and specifying, as a target base sequence, the candidate base sequence that is mapped to two or more target HLA haplotypes in a case where the base sequence is mapped to base sequence data of genomic DNA of all HLA haplotypes, but that is not mapped in a case where the base sequence is mapped to base sequence data of all genomic DNA except for the HLA alleles.

[0208] The method of the second embodiment mainly differs from the above-described first embodiment in that, in the method of the second embodiment, the candidate base sequence that is mapped to two or more target HLA haplotypes is specified as a target base sequence when the candidate base sequence is mapped to base sequence data of genomic DNA of all HLA haplotypes.

[0209] In the method of the second embodiment, the candidate base sequence, the base sequence data of all genomic DNA of HLA haplotypes, the base sequence data of all genomic DNA, and mapping are the same as those of the above-described first embodiment.

[0210] By the method of the present embodiment, a target base sequence of the gRNA of the second embodiment to be described later can be specified. As will be described later, the gRNA of the second embodiment can cleave multiple target HLA genes (or alleles). Accordingly, it is possible to reduce the types of gRNA required in a case of disrupting or modifying multiple HLA genes. Thereby, costs of producing gRNAs can be reduced. In addition, the risk of off-target mutagenesis can be reduced by reducing the types of gRNA used.

### gRNA

### First Embodiment

[0211] In one embodiment, the present invention provides a gRNA targeting, as a target base sequence, a base sequence that is mapped to only one target HLA haplotype in a case where the base sequence is mapped to base sequence data of genomic DNA of all HLA haplotypes, but that is not mapped in a case where the base sequence is mapped to base sequence data of all genomic DNA except for HLA alleles.

[0212] The gRNA of the first embodiment can specifically induce DSB in an HLA haplotype-specific manner, which makes the risk of off-target mutation introduction low.

[0213] In the present embodiment, the gRNA may be a complex of CRISPR RNA (crRNA) and trans-activated CRISPR RNA (tracrRNA), or a single synthetic gRNA (sgRNA) obtained by combining tracrRNA and crRNA. With any structure of gRNA, DSB can be induced in a target base sequence-specific manner.

[0214] A target base sequence is preferably specified by the method described above. As described above, in the present specification, the target base sequence is a base sequence including a PAM sequence. Accordingly, a base sequence obtained by removing the PAM sequence from the target base sequence is used as a spacer base sequence of crRNA or sgRNA.

[0215] In a case where the gRNA of the present embodiment is sgRNA, a base sequence of sgRNA can be the following base sequence.

[0216] First, a base sequence in which the PAM sequence has been removed from the target base sequence is used as a spacer base sequence. Then, a base sequence in which a scaffold sequence is linked to a 3′ end of the spacer base sequence is designed. As the scaffold sequence, for example, a base sequence set forth in SEQ ID NO:39 can be used, but it is not limited thereto.

[0217] The base sequence set forth in SEQ ID NO: 39 may be a base sequence in which one or several bases have been deleted, substituted, or added in the base sequence set forth in SEQ ID NO: 39, as long as the base sequence set forth in SEQ ID NO: 39 functions as a scaffold sequence. One or several bases may be, for example, 1 to 10 bases, for example, 1 to 5 bases, and for example, 1 to 3 bases.

[0218] The designed sgRNA can be prepared by chemical synthesis or the like. The sgRNA may be prepared as RNA and directly introduced into a donor cell, or may be prepared as DNA and incorporated into an expression vector, introduced into a donor cell in the form of the expression vector, and expressed intracellularly.

[0219] In a case where the sgRNA is expressed in cells, a polymerase III promoter such as U6 promoter or H1 promoter can be used. In this case, a base sequence at a 5′ end of the sgRNA may be changed to G or GG in order to improve transcription efficiency. Even in a case where the base sequence at the 5′ end of the sgRNA is changed to G or GG, a cleavage activity of Cas9 is hardly affected.

[0220] For example, in a case where a base sequence from which the PAM sequence is removed from the target base sequence is “5′-NNNNNNNNNNNNNNNNNNNN-3′” (SEQ ID NO: 62), a base sequence of the sgRNA that specifically cleaves the target base sequence is “5′-NNNNNNNNNNNNNNNNNNNNGUUUUAGAGCUAGAAAUAGCAAGUUAAAA UAAGGCUAGUCCGUUAUCAACUUGAAAAAGUGGCACCGAGUCGGUGCUUU UUUU-3′” (SEQ ID NO: 63).

[0221] The gRNA of the present embodiment may be a complex of crRNA and tracrRNA. In addition, the crRNA and tracrRNA may be directly introduced into a donor cell, or may be introduced into a donor cell in the form of an expression vector and expressed in the cell. In a case where the crRNA and tracrRNA are expressed in cells, a polymerase III promoter such as U6 promoter or H1 promoter can be used. In this case, a base sequence at a 5′ end of the crRNA or tracrRNA may be changed to G or GG in order to improve transcription efficiency. Even in a case where the base sequence at the 5′ end of the crRNA or tracrRNA is changed to G or GG, a cleavage activity of Cas9 is hardly affected.

[0222] In a case where the gRNA of the present embodiment is a complex of crRNA and tracrRNA, base sequences of crRNA and tracrRNA can be the following base sequences.

[0223] First, a base sequence in which the PAM sequence has been removed from the target base sequence is used as a spacer base sequence. Then, a base sequence in which a scaffold sequence is linked to a 3′ end of the spacer base sequence is designed to be a base sequence of the crRNA. For example, in a case where a base sequence from which the PAM sequence is removed from the target base sequence is “5′-NNNNNNNNNNNNNNNNNNNN-3′” (SEQ ID NO: 62), a base sequence of the crRNA is “5′-NNNNNNNNNNNNNNNNNNNNGUUUUAGAGCUAUGCUGUUUUG-3′” (SEQ ID NO: 64). In addition, a base sequence of the tracrRNA can be, for example, “5′-CAAAACAGCAUAGCAAGUUAAAAUAAGGCUAGUCCGUUAUCAACUUGAAA AAGUGGCACCGAGUCGGUGC-3” (SEQ ID NO: 65).

[0224] The base sequence of the crRNA may have a mutation with respect to the base sequence set forth in SEQ ID NO:64 as long as it functions as crRNA. More specifically, it may be a base sequence in which one or several bases are deleted, substituted, or added in the base sequence of SEQ ID NO: 64. One or several bases may be, for example, 1 to 10 bases, for example, 1 to 5 bases, and for example, 1 to 3 bases.

[0225] In addition, the base sequence of the tracrRNA may be a base sequence in which one or several bases are deleted, substituted, or added in the base sequence of SEQ ID NO: 65, as long as it functions as tracrRNA. One or several bases may be, for example, 1 to 10 bases, for example, 1 to 5 bases, and for example, 1 to 3 bases.

[0226] The designed crRNA and tracrRNA can be prepared by chemical synthesis or the like. The crRNA and tracrRNA may be prepared as RNA and directly introduced into a donor cell, or may be prepared as DNA and incorporated into an expression vector, introduced into a donor cell in the form of the expression vector, and expressed intracellularly.

[0227] Specific examples of gRNAs of the first embodiment include a gRNA targeting a base sequence set forth in any of SEQ ID NOs: 3, 4, 7, 45 to 52, and 72 to 2459 as a target base sequence; or a gRNA targeting, as a target base sequence, a base sequence in which one or several bases are deleted, substituted, or added at a 5′ end of a base sequence set forth in any of SEQ ID NOs: 3, 4, 7, 45 to 52, and 72 to 2459. One or several bases may be, for example, 1 to 10 bases, for example, 1 to 5 bases, and for example, 1 to 3 bases. For example, by shortening a 5′ end of a spacer sequence by 2 to 3 bases, a binding ability to DNA can be reduced, and thereby sequence recognition specificity of CRISPR-Cas9 can be increased.

[0228] Among the examples, a gRNA is preferably a gRNA targeting a base sequence set forth in any of SEQ ID NOs: 3, 4, 7, and 45 to 52 as a target base sequence; or a gRNA targeting, as a target base sequence, a base sequence in which one or several bases are deleted, substituted, or added at a 5′ end of a base sequence set forth in any of SEQ ID NOs: 3, 4, 7, and 45 to 52. As will be described later in Examples, gRNAs having these base sequences as a target base sequence disrupts or modifies HLA alleles in an HLA haplotype-specific manner, and thereby it is possible to produce low-antigenic cells in which a rejection reaction in a case where the cells are allogeneically transplanted into a recipient is reduced.

### Second Embodiment

[0229] In one embodiment, the present invention provides a gRNA targeting, as a target base sequence, a base sequence that is mapped to two or more target HLA haplotypes in a case where the base sequence is mapped to base sequence data of genomic DNA of all HLA haplotypes, but that is not mapped in a case where the base sequence is mapped to base sequence data of all genomic DNA except for HLA alleles.

[0230] Specific examples of gRNAs of the second embodiment include a gRNA targeting a base sequence set forth in any of SEQ ID NOs: 53 to 55 and 2460 to 8013 as a target base sequence; or a gRNA targeting, as a target base sequence, a base sequence in which one or several bases are deleted, substituted, or added at a 5′ end of a base sequence set forth in any of SEQ ID NOs: 53 to 55 and 2460 to 8013. One or several bases may be, for example, 1 to 10 bases, for example, 1 to 5 bases, and for example, 1 to 3 bases. For example, by shortening a 5′ end of a spacer sequence by 2 to 3 bases, a binding ability to DNA can be reduced, and thereby sequence recognition specificity of CRISPR-Cas9 can be increased.

[0231] Among the examples, a gRNA is preferably a gRNA targeting a base sequence set forth in any of SEQ ID NOs: 53 to 55 as a target base sequence; or a gRNA targeting, as a target base sequence, a base sequence in which one or several bases are deleted, substituted, or added at a 5′ end of a base sequence set forth in any of SEQ ID NOs: 53 to 55.

[0232] Furthermore, as described above, a base sequence at a 5′ end of the sgRNA may be changed to G or GG in order to improve transcription efficiency from a polymerase III promoter.

[0233] For example, in a case of focusing on the HLA-A allele, the HLA-A allele has two genes, which are an HLA-A gene derived from a father and an HLA-A gene derived from a mother, and the HLA-A genes may be the same as or different from each other in depending on cases. In order to retain an antigen-presenting ability of HLA-A, it is necessary to cleave only one HLA-A gene and induce knockout, and leave the opposite HLA-A gene. Alternatively, in a case where it is desired to induce complete knockout, it is necessary to cleave both HLA-A genes.

[0234] In general, in a case of targeting two genes to CRISPR-gRNA, it is general to design two gRNAs and induce DNA cleavage separately. Accordingly, in a case of knockout of multiple HLA genes, it is possible to use a gRNA specific to each HLA gene.

[0235] As will be described later in Examples, when the inventors of the present invention utilized a feature, in which HLA genes have high DNA sequence homology with each other, to search for a gRNA capable of inducing cleavage of multiple HLA genes with one gRNA (for example, both the father-derived sequence and the mother-derived sequence of the HLA-A gene, or the HLA-A gene and the HLA-B gene), such gRNA sequences could be identified.

[0236] As will be described later in Examples, by using the gRNA of the second embodiment, it is possible to reduce the types of gRNA required in a case of cleaving multiple HLA genes (or alleles). Thereby, costs of producing gRNAs can be reduced. In addition, the risk of off-target mutagenesis can be reduced by reducing the types of gRNA used.

### Other Embodiments

[0237] In one embodiment, the present invention provides an HLA protein expression-inducing agent which includes IFN-γ, IFN-α, IFN-β, IL-4, GM-CSF, TGF-α, or TGF-β as an active ingredient, and which induces HLA protein expression while still maintaining pluripotency of pluripotent stem cells.

[0238] In one embodiment, the present invention provides a method for inducing expression of an HLA protein while still maintaining pluripotency of pluripotent stem cells, the method including a step of adding IFN-γ, IFN-α, IFN-β, IL-4, GM-CSF, TGF-α, or TGF-β in a medium of pluripotent stem cells.

### EXAMPLES

[0239] Next, the present invention will be described in more detail with reference to examples, but the present invention is not limited to the following examples.

### Experimental Example 1

[0240] (Design of gRNA)

[0241] It is difficult to design a base sequence of gRNA that cleaves only a specific HLA haplotype because an HLA gene has a large individual difference in sequence and homology between HLA genes is high. Specifically, for example, it was difficult to design a gRNA sequence that recognizes only an HLA-A*01:01 allele and does not recognize other HLA-A alleles, HLA genes other than HLA-A, and other genomic regions.

[0242] Accordingly, a target base sequence of gRNA that recognizes the HLA-A allele, the HLA-B allele, and the HLA-C allele was determined by the following method. First, from the IPD-IMGT/HLA database (https://www.ebi.ac.uk/ipd/imgt/hla/), an “hla_gen.fasta” file including base sequences of genomic DNA of all HLA haplotypes was downloaded.

[0243] Then, from the base sequences of genomic DNA of all HLA haplotypes, a base sequence corresponding to “NNNNNNNNNNNNNNNNNNNNNGG” (SEQ ID NO:40) was extracted as a candidate of a target base sequence of a gRNA of SpCas9 (sgRNA).

[0244] Then, base sequences of each candidate were mapped to the base sequences of all HLA haplotypes using a Bowtie program (http://bowtie-bio.sourceforge.net/index.shtml), and it was analyzed how many sites and to which HLA gene the base sequences of each candidate were mapped. The same operation can be performed using a sequence homology search program other than the Bowtie program.

[0245] Then, based on results of the Bowtie program, the results were classified into a case in which each sgRNA was bonded to only one of the HLA-A allele, the HLA-B allele or the HLA-C allele, and a case in which each sgRNA was bonded to two or more HLA alleles such as the HLA-A allele and the HLA-B allele, the HLA-A allele and the HLA-C allele, the HLA-B allele and the HLA-C allele, and the HLA-A allele, the HLA-B allele, and the HLA-C allele.

[0246] Then, all candidate base sequences were mapped to a reference human genome sequence (Hg19) using Bowtie, and it was checked whether or not the candidate base sequences were mapped to a genomic region other than the HLA allele. As a result, a candidate base sequence mapped only to the HLA allele was extracted as an intended target base sequence.

[0247] FIG. 1(a) is a Venn diagram showing which of the HLA-A allele, the HLA-B allele, and the HLA-C allele is targeted by a target base sequence extracted in the present experimental example. The numbers in the figure indicate the number of target base sequences of sgRNA. As a result, it was possible to determine a large number of target base sequences of sgRNA targeting only one of the HLA-A allele, the HLA-B allele, or the HLA-C allele, and target base sequences of sgRNA targeting two or more HLA alleles such as the HLA-A allele and the HLA-B allele, the HLA-A allele and the HLA-C allele, the HLA-B allele and the HLA-C allele, the HLA-A allele, the HLA-B allele, and the HLA-C allele.

[0248] FIG. 1(b) is a diagram showing which sites of an HLA-A allele, an HLA-B allele, and an HLA-C allele a target base sequence of an sgRNA identified in the present experimental example targets. In FIG. 1(b), boxes connected by lines indicate exons of each HLA gene, and the HLA-A allele has an exon 1 on the left side, and the HLA-B allele and the HLA-C allele have an exon 1 on the right side. In addition, the term “[+] strand sgRNAs” indicates target base sequences targeting plus-strand DNA, the term “[−] strand sgRNAs” indicates target base sequences targeting minus-strand DNA, and the term “Unique k-mers” indicates a set of 10 to 16 mer base sequences (also referred to as “k-mer sequences”) that is present only at one site on the human genome.

[0249] As a result, it was revealed that a large number of sgRNA target sequences could be found at a site at which a peak of unique k-mers was high. A considerable number of target base sequences could be found in both the plus-strand DNA and the minus-strand DNA.

[0250] On SEQ ID NOs: 3, 4, 7, 45 to 52, and 72 to 2459, a base sequence is shown, which is extracted as a base sequence that is mapped to only one target HLA haplotype in a case where the base sequence is mapped to base sequence data of genomic DNA of all HLA haplotypes, but that is not mapped in a case where the base sequence is mapped to base sequence data of all genomic DNA except for HLA alleles. In addition, Table 1 shows, as an example, the number of target HLA alleles and target HLA alleles for some base sequences.

TABLE 1

| SEQ ID | Number of target | |
|---|---|---|
| NO. | HLA alleles | Target HLA alleles |
| 72 | 1 | A*11:01:01:02 |
| 73 | 1 | A*11:05 |
| 74 | 1 | A*11:01:01:02 |
| 75 | 1 | A*02:43N |
| 76 | 1 | B*73:01 |

[0251] In addition, on SEQ ID NOs: 53 to 55 and 2460 to 8013, a base sequence is shown, which is extracted as a base sequence that is mapped to two or more target HLA haplotypes in a case where the base sequence is mapped to base sequence data of genomic DNA of all HLA haplotypes, but that is not mapped in a case where the base sequence is mapped to base sequence data of all genomic DNA except for HLA alleles. In addition, Table 2 shows, as an example, the number of target HLA alleles and target HLA alleles for some base sequences.

TABLE 2

| SEQ | Number of | |
|---|---|---|
| ID | target HLA | |
| NO. | alleles | Target HLA alleles |
| 2460 | 44 | A*02:01:01:01, A*02:01:01:02L, A*02:01:01:03, |
| | | A*02:01:01:04, A*02:01:01:05, A*02:01:01:06, |
| | | A*02:01:120, A*02:01:121, A*02:02:01:01, |
| | | A*02:02:01:02, A*02:03:01, A*02:03:03, |
| | | A*02:05:01, A*02:06:01:01, A*02:06:01:02, |
| | | A*02:06:01:03, A*02:06:22, A*02:07:01, |
| | | A*02:10, A*02:193, A*02:251, A*02:259, |
| | | A*02:264, A*02:265, A*02:266, A*02:269, |
| | | A*02:279, A*02:32N. A*02:376, A*02:43N, |
| | | A*02:455, A*02:48, A*02:51, A*02:533, |
| | | A*02:53N, A*02:602, A*02:603, A*02:60:01, |
| | | A*02:68, A*02:77, A*02:81, A*02:89, A*02:95, |
| | | A*69:01 |
| 2461 | 2 | A*80:01:01:01, A*80:01:01:02 |
| 2462 | 138 | A*01:01:01:01, A*01:01:01:02N, A*01:01:38L, |
| | | A*01:01:71, A*01:01:73, A*01:02, A*01:03, |
| | | A*01:04N, A*01:09, A*01:11N, A*01:14, |
| | | A*01:16N, A*01:194, A*01:20, A*02:57, |
| | | A*02:65, A*03:01:01:01, A*03:01:01:02N, |
| | | A*03:01:01:03, A*03:01:01:04, A*03:01:01:05, |
| | | A*03:01:01:06, A*03:02:01, A*03:11N, |
| | | A*03:213, A*03:218, A*03:21N, A*03:224, |
| | | A*03:231, A*03:234Q, A*03:36N, A*03:89:02, |
| | | A*11:01:01:01, A*11:01:18, A*11:02:01, |
| | | A*11:05, A*11:110, A*11:183, A*11:190, |
| | | A*11:210N, A*11:25:01, A*11:50Q, A*11:60, |
| | | A*11:69N, A*11:74, A*11:75, A*11:77, |
| | | A*23:01:01, A*23:09, A*23:17, A*23:19N, |
| | | A*23:38N, A*24:02:01:01, A*24:02:01:02L, |
| | | A*24:02:01:03, A*24:02:01:04, A*24:02:01:05, |
| | | A*24:02:03Q, A*24:02:10, A*24:03:01, |
| | | A*24:07:01, A*24:08, A*24:09N, A*24:10:01, |
| | | A*24:11N, A*24:152, A*24:20, A*24:215, |
| | | A*24:252N, A*24:293, A*24:56, A*24:61, |
| | | A*24:86N, A*25:01:01, A*26:01:01:01, |
| | | A*26:01:01:02, A*26:01:39, A*26:04, |
| | | A*26:07:02, A*26:107N, A*26:115, A*26:11N, |
| | | A*26:15, A*26:50, A*29:01:01:01, |
| | | A*29:01:01:02N, A*29:02:01:01, A*29:02:01:02, |
| | | A*29:02:01:03, A*29:02:17, A*29:03, A*29:46, |
| | | A*31:01:02:01, A*31:01:02:02, A*31:01:02:03N, |
| | | A*31:01:04, A*31:01:23, A*31:01:24, A*31:04, |
| | | A*31:14N, A*31:36, A*31:46, A*32:01:01, |
| | | A*32:06, A*32:69, A*33:01:01, A*33:03:01, |
| | | A*33:07, A*34:01:01, A*34:02:01, A*34:14, |
| | | A*36:01, A*43:01, A*66:01:01, A*66:17, |
| | | A*68:01:01:01, A*68:01:01:02., A*68:01:02:01, |
| | | A*68:01:02:02, A*68:01:02:03, A*68:02:01:01, |
| | | A*68:02:01:02, A*68:02:01:03, A*68:02:02, |
| | | A*68:03:01, A*68:07, A*68:08:01, A*68:139, |
| | | A*68:140, A*68:17, A*68:18N, A*68:22, |
| | | A*68:71, A*74:01:01, A*74:01:02, A*74:01:03, |
| | | A*74:02:01:01, A*74:02:01:02 |
| 2463 | 2 | A*80:01:01:01, A*80:01:01:02 |
| 2464 | 7 | A*30:01:01, A*30:01:11, A*30:02:01:01, |
| | | A*30:02:01:02, A*30:02:01:03, A*30:04:01, |
| | | A*30:89 |

[0252] Furthermore, Table 3 shows the number of target HLA alleles and the number of extracted target base sequences, regarding a base sequence extracted as a base sequence that is mapped to two or more target HLA haplotypes in a case where the base sequence is mapped to base sequence data of genomic DNA of all HLA haplotypes, but that is not mapped in a case where the base sequence is mapped to base sequence data of all genomic DNA except for HLA alleles.

TABLE 3

| Number of target | Number of target |
|---|---|
| HLA alleles | base sequences |
| 2 | 378 |
| 3 | 115 |
| 4 | 88 |
| 5~10 | 537 |
| 11~100 | 2604 |
| 101~200 | 926 |
| 201~300 | 547 |
| 301~400 | 173 |
| 401~500 | 65 |
| 501 or more | 121 |

### Experimental Example 2

### (Induction 1 of HLA Protein Expression by Stimulation of iPS Cells)

[0253] An attempt was made to stimulate undifferentiated iPS cells to induce HLA protein expression. Specifically, 100 ng/mL of lipopolysaccharide (LPS), 100 ng/mL of TNF-α, or 50 ng/mL of IFN-γ was added to a medium of iPS cells and treated for 48 hours. Thereafter, flow cytometric analysis was performed using an anti-HLA-ABC antibody (product number: 311418, BIOLEGEND) to examine expression of HLA protein.

[0254] FIG. 2 is a graph showing results of flow cytometry. As a result, it was revealed that the addition of IFN-γ increased the expression of HLA protein.

### Experimental Example 3

### (Induction 2 of HLA Protein Expression by Stimulation of iPS Cells)

[0255] 10 ng/mL, 50 ng/mL, or 100 ng/mL of IFN-γ was added to a medium of iPS cells and treated for 48 hours. Thereafter, flow cytometric analysis was performed using an anti-HLA-ABC antibody (product number: 311418, BIOLEGEND) to examine expression of HLA protein.

[0256] FIG. 3 is a graph showing results of flow cytometry. As a result, it was revealed that the addition of IFN-γ increased the expression of HLA protein. As a result, it was revealed that the addition of any concentration of IFN-γ increased the expression of HLA protein.

### Experimental Example 4

[0257] (Induction 3 of HLA protein expression by stimulation of iPS cells)

[0258] 50 ng/mL of IFN-γ was added to a medium of iPS cells and treated for 4 hours, 8 hours, 16 hours, 24 hours, and 48 hours. Thereafter, flow cytometric analysis was performed using anti-HLA-A2 antibody (product number: 740082, BD) to examine expression of HLA-A2 protein.

[0259] FIG. 4(a) is a graph showing results of flow cytometry. In addition, FIG. 4(b) is a diagram showing a schedule for an IFN-γ treatment of iPS cells and analysis of an expression level of an HLA-A protein. As a result, it was revealed that the longer the IFN-γ treatment time, the higher the expression of HLA protein. Furthermore, as a result of further examination, it was revealed that after the iPS cells were treated with IFN-γ for 48 hours, the expression of HLA protein was maintained even 7 days after removal of IFN-γ from the medium.

### Experimental Example 5

### (Determination of HLA Haplotype of Cells)

[0260] An HLA haplotype of each cell (a pair of each HLA allele inherited from parents) was determined by the following method.

[0261] First, a FASTQ sequence file was created for each of 604B1 iPS cells and 1383D2 iPS cells based on Whole Exome Sequencing (WES) analysis results of the 604B1 iPS cells and Whole Genome Sequencing (WGS) analysis results of the 1383D2 iPS cells.

[0262] Subsequently, each FASTQ sequence file was mapped to a reference human genome sequence (Hg19) to create a BAM file. Subsequently, each of the above-described BAM files was analyzed using software (name “HLA-genotyper,” https://pypi.python.org/pypi/hla-genotyper/0.4.2b1) to determine an HLA haplotype of each cell.

[0263] In addition, for 585A1 iPS cells, extracted genomic DNA was sent to HLA Research Institute (http://hla.or.jp/), and an HLA haplotype was determined by a fluorescent bead method (PCR-rSSO/Luminex method). Furthermore, for 604B1 iPS cells, an HLA haplotype was determined in the same manner as for 585A1 iPS cells.

[0264] Furthermore, regarding peripheral blood mononuclear cells (PBMC), cells for which HLA haplotype information was provided by the vendors (CTL, Wako) were used.

### Experimental Example 6

[0265] (Examination on Genomic Cleavage Activity of sgRNA)

[0266] Among the sgRNAs targeting the target base sequence specified in Experimental Example 1, A0207-ex3-g1 (where a target base sequence is shown in SEQ ID NO: 3), A0207-ex3-g2 (where a target base sequence is shown in SEQ ID NO: 4), and A0207-ex3-g4 (where a target base sequence is shown in SEQ ID NO: 7), which were sgRNAs which cleaved only an A*02:07 allele and of which base sequences did not match an A*32:01 allele, were selected.

[0267] A base sequence of each sgRNA used in each of the following experimental examples was a base sequence in which a scaffold sequence set forth in SEQ ID NO:39 was linked to a 3′ side of a base sequence from which a PAM sequence was removed from a target base sequence of each sgRNA. For example, in a case where a base sequence from which a PAM sequence was removed from a target base sequence was “5′-NNNNNNNNNNNNNNNNNNNN-3” (SEQ ID NO:62), a base sequence of an sgRNA used was “5′-NNNNNNNNNNNNNNNNNNNNGUUUUAGAGCUAGAAAUAGCAAGUUAAAA UAAGGCUAGUCCGUUAUCAACUUGAAAAAGUGGCACCGAGUCGGUGCUUU UUUU-3” (SEQ ID NO:63). Furthermore, in each of the following experimental examples, each sgRNA was introduced into a cell in the form of an expression vector and expressed in the cell to be used.

[0268] FIG. 5(a) is a diagram showing target bases and target sites of sgRNAs found in an exon 3 region of HLA-A. In FIG. 5 (a), a box indicates an exon of an HLA-A*02:07 gene, and an arrow indicates a position of a target base sequence of each sgRNA. Furthermore, FIG. 5(a) also shows a base sequence of a wild type A*02:07 allele and a base sequence of a wild type A*32:01 allele. Portions of both alleles at which sequences differ are shown with capital letters, and a PAM sequence of sgRNA is shown with an underline.

[0269] Subsequently, A0207-ex3-g1, A0207-ex3-g2, and A0207-ex3-g4 were each transfected together with purified Cas9 protein into 1383D2 iPS cells having an HLA haplotype of Table 4. The transfection was carried out using a commercially available kit (model “CRISPR-MAX,” product number: CMAX00003, Thermo Fisher Scientific).

TABLE 4
HLA haplotype of 1383D2 iPS cell

| | HLA-A | | HLA-B | | HLA-C | |
|---|---|---|---|---|---|---|
| HLA | A*02:07 | A*32:01 | B*15:02 | B*51:01 | C*08:01 | C*14:02 |
| allele | | | | | | |

[0270] Then, after extracting genomic DNA, gene mutation introduction efficiency in each cell was examined by T7 endonuclease 1 (T7E1) assay. The T7E1 assay was performed as follows.

[0271] First, Nested PCR was performed using a primer that specifically amplifies the A*02:07 allele of the HLA-A2 region. Primers shown in Table 5 were used for Nested PCR.

TABLE 5

| | | |
|---|---|---|
| Primer name | Base sequence | SEQ ID NO. |

Primers for 1st PCR

| | | |
|---|---|---|
| 1383D2-HLA-A-be-ex1-fwd | TTGGGGATTCCCCAACTCC | 41 |
| HLA-A-in7-rev | GTCCACTGTTCCGCCCAA | 42 |

Primers for 2nd PCR

| | | |
|---|---|---|
| HLA-A0207-ex2-fwd | GGTCCGGAGTATTGGGACGG | 43 |
| HLA-A0207-ex3-rev | TCTCAACTGCTCCGCCACAT | 44 |

[0272] Then, a PCR product was purified, and 1/10 volume of 10×NEBuffer2 (NEB) buffer was added to the purified PCR product (400 ng) and heated at 95° C. for 5 minutes to heat-modify double-stranded DNA. Thereafter, re-annealing was performed by gradually lowering the temperature. More specifically, cooling was performed from 95° C. to 85° C. at −2° C./sec, and from 85° C. to 25° C. at −0.1° C./sec.

[0273] Then, 10 units of T7 endonuclease I (T7EI, Cat. No. M0302S, NEB) was added to the PCR product after reannealing and treated at 37° C. for 15 minutes. Subsequently, activity of T7EI was stopped by adding a 0.25 M EDTA solution at 1/10 volume of the reaction solution, and then a sample was maintained at a low temperature (on ice).

[0274] Subsequently, the T7EI-treated PCR product was subjected to 2% agarose gel electrophoresis, and DNA signal intensities of a cleaved band and an uncut band were quantified with ImageJ software.

[0275] FIG. 5(b) shows the results of analysis of the genomic DNA mutation introduction efficiency in a case where each sgRNA was used by the T7E1 assay. In FIG. 5(b), “T7EI” indicates T7 endonuclease I, “−” indicates that no addition was performed, and “+” indicates that addition was performed. Furthermore, “ex3-g1” indicates a result of introducing A0207-ex3-g1, “ex3-g2” indicates a result of introducing A0207-ex3-g2, and “ex3-g4” indicates a result of introducing A0207-ex3-g4, and “DMD#1” indicates a result of introducing an sgRNA specific to a dystrophin gene, which was used as a positive control. Furthermore, an arrowhead indicates a band cleaved by T7EI.

[0276] As a result, it was revealed that A0207-ex3-g4 sgRNA has the highest genome cleavage activity.

### Experimental Example 7

### (HLA-Allele-Specific Knockout 1)

### <<Confirmation of HLA Protein Expression>>

[0277] In order to confirm the expression of HLA on a cell surface, two iPS cell strains having HLA serotype A2 (1383D2 strain and 404C2 strain) were selected. Furthermore, a 604B1 strain was selected as an iPS cell strain not having the HLA serotype A2. Regarding undifferentiated iPS cells of a total of three strains, for in a case where the cells were treated with cytokine and a case where the cells were treated with 50 ng/mL of IFN-γ for 48 hours, the cells were stained using an anti-HLA-A2 antibody (product number: 740082, BD), and flow cytometric analysis was performed thereon.

[0278] FIG. 6(a) is a graph showing results of flow cytometric analysis. As a result, by IFN-γ treatment, specific expression of HLA-A2 was confirmed in the 1383D2 cells and the 404C2 cells.

### <<HLA-Allele-Specific Knockout>>

[0279] Subsequently, A0207-ex3-g1 (where a target base sequence is shown in SEQ ID NO: 3), A0207-ex3-g2 (where a target base sequence is shown in SEQ ID NO: 4), and A0207-ex3-g4 (where a target base sequence is shown in SEQ ID NO: 7), which were the above-described sgRNAs, were respectively transfected into 1383D2 iPS cells together with a purified Cas9 protein. The transfection was carried out using a commercially available kit (model “CRISPR-MAX,” product number: CMAX00003, Thermo Fisher Scientific).

[0280] In addition, as a control sgRNA that does not disrupt an HLA gene, sgRNA-DMD#1 (where a target base sequence is shown in SEQ ID NO: 61) targeting a dystrophin (DMD) gene on the X chromosome was used.

[0281] Subsequently, each transfected iPS cell was passaged in 2 wells, one well kept untreated with cytokines and the other well was treated with 50 ng/mL of IFN-γ added to a medium for 48 hours. Thereafter, flow cytometric analysis was performed on the cells using an anti-HLA-A2 antibody (product number: 740082, BD).

[0282] FIG. 6(b) is a graph showing results of flow cytometric analysis. As a result, it was revealed that, in a case where A0207-ex3-g4 sgRNA targeting the highest genome cleaving activity was used, the cells in which the largest number of an HLA-A2 antigen was disrupted appeared.

<<Analysis of Base Sequence of Target Site of sgRNA>>

[0283] Then, genomic DNA was extracted from 1383D2 iPS cells into which sgRNA (A0207-ex3-g4) had been introduced, and using a primer specifically amplifying the A*02:07 allele and not amplifying the A*32:01 allele, Nested PCR was performed to amplify a target site of sgRNA. Primers shown in Table 6 were used for Nested PCR.

TABLE 6

| | | |
|---|---|---|
| Primer name | Base sequence | SEQ ID NO. |

Primers for 1st PCR

| | | |
|---|---|---|
| 1383D2-HLA-A-be-ex1-fwd | TTGGGGATTCCCCAACTCC | 41 |
| HLA-A-in7-rev | GTCCACTGTTCCGCCCAA | 42 |

Primers for 2nd PCR

| | | |
|---|---|---|
| HLA-A0207-ex2-fwd | GGTCCGGAGTATTGGGACGG | 43 |
| HLA-A0207-ex3-rev | TCTCAACTGCTCCGCCACAT | 44 |

[0284] Then, a PCR product was cloned by TA cloning into a pGEM-T-Easy vector (Promega). Subsequently, 21 strains of Escherichia coli colonies were recovered, and a base sequence was determined by Sanger sequence. As a result, it was revealed that 11 strains had a wild-type base sequence, but 10 strains (4 strains of deletion and 6 strains of insertion) had some insertion deletion mutation (Indel mutation).

[0285] In addition, 1383D2 iPS cells to which sgRNA (A0207-ex3-g4) was introduced were stained with an anti-HLA-A2 antibody (product number: 740082, BD), and cells in which an HLA-A2 antigen became negative were sorted by a flow cytometer. Genomic DNA was extracted from the sorted iPS cells, and Nested PCR was performed using each of the primers (described above) that specifically amplify the A*02:07 allele which was the target allele. In addition, Nested PCR was performed using each of primers that specifically amplify the A*32:01 allele which was not the target. Primers shown in Table 7 were used for Nested PCR of the A*32:01 allele.

TABLE 7

| | | |
|---|---|---|
| Primer name | Base sequence | SEQ ID NO. |

Primers for 1st PCR

| | | |
|---|---|---|
| 1383D2-HLA-A-be-ex1-fwd | TTGGGGATTCCCCAACTCC | 41 |
| HLA-A-in7-rev | GTCCACTGTTCCGCCCAA | 42 |

Primers for 2nd PCR

| | | |
|---|---|---|
| HLA-A3201-ex2-fwd | GGGCCGGAGTATTGGGACCA | 70 |
| HLA-A3201-ex3-rev | CTCAACTGCTCCGCCACAT | 71 |

[0286] Then, a PCR product was cloned by TA cloning into a pGEM-T-Easy vector (Promega). Escherichia coli colonies were recovered from 16 strains (A*02:07 allele) and 19 strains (A*32:01 allele), and base sequences were determined by Sanger sequence. Then, based on the determined base sequence, the number of clones with a deletion in the sequence, the number of clones with insertion, and the number of clones without sequence change were counted.

[0287] As a result, the A*02:07 allele had some insertion deletion mutation (Indel mutation) in all subclones of the 16 strains. On the other hand, the A*32:01 allele was confirmed to be a wild-type base sequence in all subclones of the 19 strains.

[0288] FIG. 7 shows a graph showing genomic DNA mutation introduction efficiency in a case where sorting by HLA-A2 antigen expression was not performed and in a case where sorting a cell group in which HLA-A2 antigen expression was negative was performed, after introducing sgRNA into the iPS cell 1383D2 strain to induce genome editing.

[0289] As a result, it was revealed that proportion of cells in which the A*02:07 target allele was genome-edited was increased by sorting HLA antigen-negative cells. In addition, it was also confirmed that no mutation was introduced into the HLA-A*32:01 allele, which is a non-target allele.

### Experimental Example 8

### (HLA-Allele-Specific Knockout 2)

[0290] By disrupting the HLA allele of 604B1 iPS cells having the HLA haplotype shown in Table 8, low-antigenic cells were produced in which a rejection reaction was reduced in a case where the cells were allogeneically transplanted into a recipient A having a hypothetical HLA haplotype shown in Table 9. HLA haplotypes shown in Table 9 are HLA haplotypes of peripheral blood mononuclear cells (PBMC, type “LP_194,” CTL).

[0291] As shown in Table 8 and Table 9, 604B1 iPS cells have A*01:01 and B*07:02 alleles. In addition, these HLA alleles are not present in the recipient A. Accordingly, in a case where the 604B1 iPS cells or cells differentiation-induced from the 604B1 iPS cells are transplanted into a recipient, T cells of the recipient A attack the cells and immune rejection occurs.

[0292] For this reason, in order to reduce a rejection reaction, the HLA alleles that are present in the donor cells but not present in the recipient A, that is, the A*01:01 allele and the B*07:02 allele, are disrupted such that cells do not express an HLA protein specific to donor cells.

TABLE 8
HLA haplotype of 604B1 iPS cell

| HLA-A | | HLA-B | | HLA-C | |
|---|---|---|---|---|---|
| A*01:01 | A*24:02 | B*07:02 | B*37:01 | C*06:02 | C*07:02 |

TABLE 9
HLA haplotype of virtual recipient A (PBMC “LP_194,” CTL)

| HLA-A | | HLA-B | | HLA-C | |
|---|---|---|---|---|---|
| A*24:02 | A*24:02 | B*37:01 | B*39:06 | C*06:02 | C*07:02 |

[0293] From among the sgRNAs identified in Experimental Example 1, two sgRNAs (A0101-ex3-g1 (where a target base sequence is set forth in SEQ ID NO: 45) and A0101-ex3-g2 (where a target base sequence is set forth in SEQ ID NO: 46)) which cleave only the A*01:01 allele and of which base sequences do not match the A*24:02 allele; two sgRNAs (B0702-ex2-g1 (where a target base sequence is set forth in SEQ ID NO: 47) and B0702-ex2-g2 (where a target base sequence is set forth in SEQ ID NO: 48)) which cleave only the B*07:02 allele and of which sequences do not match the B*37:01 allele were selected.

[0294] Then, each of the above sgRNAs was synthesized by an in vitro transcription reaction, and each was transfected into 604B1 iPS cells together with a purified Cas9 protein. The transfection was carried out using a commercially available kit (model “CRISPR-MAX,” product number: CMAX00003, Thermo Fisher Scientific).

[0295] When the A*01:01 allele or the B*07:02 allele was cleaved by the introduction of sgRNA and a gene mutation occurred in the process of repairing it, the A*01:01 allele or the B*07:02 allele was knocked out, and thereby cells in which an HLA-A1 protein or an HLA-B7 protein was deficient were obtained.

[0296] Subsequently, each iPS cell was stimulated with 50 ng/mL of IFN-γ for 48 hours to induce the expression of HLA protein. Subsequently, each iPS cell was stained with an anti-HLA-A1 antibody (type “ab33883,” abeam) or an anti-HLA-B7 antibody (type “MCA986,” Bio-Rad), and a percentage of HLA protein-negative cells was analyzed by flow cytometry.

[0297] FIG. 8(a) and FIG. 8(b) are graphs showing results of flow cytometric analysis. FIG. 8(a) shows the results of measuring an expression level of the HLA-A1 protein in the iPS cells in which the A*01:01 allele was disrupted, and FIG. 8(b) shows the results of measuring an expression level of the HLA-B7 protein in the iPS cells in which the B*07:02 allele was disrupted. In FIGS. 8(a) and 8(b), “No transfection” indicates the results of the iPS cells into which an sgRNA was not introduced.

[0298] As a result, it was revealed that 11.2% of cells were deficient in the HLA-A1 protein in a case where A0101-ex3-g1 (where a target base sequence is set forth in SEQ ID NO: 45) was used as sgRNA. In addition, it was revealed that 18.9% of the cells were deficient in the HLA-A1 protein in a case where A0101-ex3-g2 (where a target base sequence is set forth in SEQ ID NO: 46) was used as an sgRNA. Based on these results, it was revealed that A0101-ex3-g2 was an sgRNA targeting a higher knockout efficiency.

[0299] Furthermore, it was revealed that 11.6% of cells were deficient in the HLA-B7 protein in a case where B0702-ex2-g1 (where a target base sequence is set forth in SEQ ID NO: 47) was used as sgRNA. Furthermore, it was revealed that 0.7% of cells were deficient in the HLA-B7 protein in a case where B0702-ex2-g2 (where a target base sequence is set forth in SEQ ID NO: 48) was used as sgRNA. Based on these results, it was revealed that B0702-ex2-g1 was an sgRNA targeting a higher knockout efficiency.

[0300] Based on these results, A0101-ex3-g2 and B0702-ex2-g1 which had high knockout efficiency were selected, and both A*01:01 allele and B*07:02 allele were knocked out. Specifically, 604B1 iPS cells were transfected with the selected two kinds of sgRNA together with a purified Cas9 protein. The transfection was carried out using a commercially available kit (model “CRISPR-MAX,” product number: CMAX00003, Thermo Fisher Scientific).

[0301] Subsequently, iPS cells were stimulated with 50 ng/mL of IFN-γ for 48 hours to induce the expression of HLA protein. Subsequently, iPS cells were stained with an anti-HLA-A1 antibody (type “ab33883,” abeam) and an anti-HLA-B7 antibody (type “MCA986,” Bio-Rad), and analysis was performed by flow cytometry.

[0302] FIG. 9(a) and FIG. 9(b) are graphs showing results of flow cytometric analysis. In FIG. 9(a), “No transfection” indicates the analysis results of the iPS cells into which an sgRNA was not introduced. In addition, in FIG. 9(b), “A0101-ex3-g2” and “B0702-ex2-g1” indicate the analysis results of iPS cells into which these two sgRNAs were co-introduced and both the A*01:01 allele and the B*07:02 allele were knocked out.

[0303] In addition, single cell sorting was performed from a cell population in which both HLA-A1 protein and HLA-B7 protein were negative, and subclones of 15 strains were recovered. Subsequently, genomic DNA was extracted from each subclone. Then, a PCR reaction for amplifying a region containing a target site (exon 3) of A0101-ex3-g2, which is the sgRNA used and a region containing a target site (exon 2) of B0702-ex2-g1 was performed. Thereafter, a base sequence was analyzed by Sanger sequence.

[0304] FIG. 10(a) is a table showing a base mutation pattern of each clone recovered. In FIG. 10(a), “WT” indicates that it was a wild-type base sequence, “−” indicates that it had a deletion mutation, and “+” indicates that it had an insertion mutation. For example, “−5 bp” indicates that it has a deletion of 5 bases, and “+18 bp” indicates that it has an insertion of 18 bases. In FIG. 10(b), base sequences of two strains (#8 and #10) are shown as a representative example.

[0305] As a result, it was revealed that some insertion deletion mutation (Indel mutation) occurred in both A*01:01 allele and B*07:02 allele in clones of 11 strains out of 15 strains. From the clones of 11 strains in which Indel mutation occurred, two strains in which frameshift mutation occurred (#8 and #10) were selected and used in the following experiments.

### Experimental Example 9

### (HLA-Allele-Specific Knockout 3)

[0306] By disrupting the HLA allele of 585A1 iPS cells having the HLA haplotype shown in Table 10, low-antigenic cells were produced in which a rejection reaction was reduced in a case where the cells were allogeneically transplanted into a recipient B having a hypothetical HLA haplotype shown in Table 11. HLA haplotypes shown in Table 11 are HLA haplotypes of peripheral blood mononuclear cells (PBMC, type “2010113203,” Wako).

[0307] As shown in Table 10 and Table 11, the 585A1 iPS cells had the B*07:02 allele and the C*07:02 allele. In addition, these HLA alleles are not present in the recipient B. Accordingly, in a case where the 585A1 iPS cells or cells differentiation-induced from the 585A1 iPS cells are transplanted into a recipient, T cells of the recipient B attack the cells and immune rejection occurs.

[0308] For this reason, in order to reduce a rejection reaction, the HLA alleles that are present in the donor cells but not present in the recipient B, that is, the B*07:02 allele and the C*07:02 allele, are disrupted such that cells do not express an HLA protein specific to donor cells.

TABLE 10
HLA haplotype of 585A1 iPS cell

| HLA-A | | HLA-B | | HLA-C | |
|---|---|---|---|---|---|
| A*24:02 | A*24:02 | B*07:02 | B*52:01 | C*07:02 | C*12:02 |

TABLE 11
HLA haplotype of virtual recipient B (PBMC “2010113203,” Wako)

| HLA-A | | HLA-B | | HLA-C | |
|---|---|---|---|---|---|
| A*24:02 | A*24:02 | B*40:06 | B*52:01 | C*08:01 | C*12:02 |

[0309] As sgRNA, B0702-ex2-g1 (where a target base sequence is set forth in SEQ ID NO: 47) specific to the B*07:02 allele, and C0702-ex3-g3 (where a target base sequence is set forth in SEQ ID NO: 49) specific to the C*07:02 allele were used. In addition, both the B*07:02 allele and C*07:02 allele of the 585A1 iPS cells were knocked out in the same manner as in Experimental Example 7 except that a commercially available kit (trade name “4D-Nucleofector,” model “V4XP-4032,” Lonza) was used for transfection.

[0310] Subsequently, iPS cells were stimulated with 50 ng/mL of IFN-γ for 48 hours to induce the expression of HLA protein. Subsequently, iPS cells were stained with an anti-HLA-B7 antibody (type “MCA986,” Bio-Rad), and analysis was performed by flow cytometry.

[0311] FIG. 11 is a graph showing results of flow cytometric analysis. In FIG. 11, “No stain” indicates the analysis results of iPS cells that were not stained with an antibody, “No transfection” indicates the analysis results of iPS cells into which sgRNA was not introduced, and “B0702-ex2-g1” and “C0702-ex3-g3” indicate the analysis results of iPS cells in which both B*07:02 allele and C*07:02 allele were knocked out by introducing these sgRNAs into the cells.

[0312] In addition, single cell sorting was performed from a cell population in which an HLA-B7 protein was negative, and subclones of 28 strains were recovered. Subsequently, genomic DNA was extracted from each subclone. Then, a PCR reaction for amplifying a region containing a target site (exon 2) of B0702-ex2-g1, which is the sgRNA used and a region containing a target site (exon 3) of C0702-ex3-g3 was performed. Thereafter, a base sequence was analyzed by Sanger sequence.

[0313] FIG. 12 is a table showing a base mutation pattern of each clone recovered. In FIG. 12(a), “WT” indicates that it was a wild-type base sequence, “−” indicates that it had a deletion mutation, and “+” indicates that it had an insertion mutation. In FIG. 12(b), base sequences of three strains (#2, #11, and #26) are shown as a representative example.

[0314] As a result, it was revealed that some insertion deletion mutation (Indel mutation) occurred in both B*07:02 allele and C*07:02 allele in multiple clones. Three strains (#2, #11, and #26) were selected from the clones in which the Indel mutation had occurred and used in the following experiment.

### Experimental Example 10

### (HLA-Allele-Specific Knockout 4)

[0315] By disrupting the HLA allele of 585A1 iPS cells having the HLA haplotype shown in Table 12, low-antigenic cells were produced in which a rejection reaction was reduced in a case where the cells were allogeneically transplanted into a recipient C having a hypothetical HLA haplotype shown in Table 13. HLA haplotypes shown in Table 13 are HLA haplotypes of peripheral blood mononuclear cells (PBMC, type “LP_266,” CTL).

[0316] As shown in Tables 12 and 13, the 585A1 iPS cells had the B*52:01 allele and the C*12:02 allele. In addition, these HLA alleles are not present in the recipient C. Accordingly, in a case where the 585A1 iPS cells or cells differentiation-induced from the 585A1 iPS cells are transplanted into the recipient C, T cells of the recipient C attack the cells and immune rejection occurs.

[0317] For this reason, in order to reduce a rejection reaction, the HLA alleles that are present in the donor cells but not present in the recipient C, that is, the B*52:01 allele and the C*12:02 allele, are disrupted such that cells do not express an HLA protein specific to donor cells.

TABLE 12
HLA haplotype of 585A1 iPS cell

| HLA-A | | HLA-B | | HLA-C | |
|---|---|---|---|---|---|
| A*24:02 | A*24:02 | B*07:02 | B*52:01 | C*07:02 | C*12:02 |

TABLE 13
HLA haplotype of virtual recipient C (PBMC “LP_266,” CTL)

| HLA-A | | HLA-B | | HLA-C | |
|---|---|---|---|---|---|
| A*03:01 | A*24:02 | B*07:02 | B*40:02 | C*03:05 | C*07:02 |

[0318] The C*12:02 allele in the 585A1 iPS cells was knocked out in the same manner as in Experimental Example 9 except that C1202-ex3-g1 (where a target base sequence is set forth in SEQ ID NO: 50), which was specific to the C*12:02 allele, was used as sgRNA, and that cell sorting was not performed. Thereby, subclones of 17 strains were obtained. The cells were not sorted because the anti-HLA-Cl 2 allele-specific antibody was not available.

[0319] Subsequently, genomic DNA was extracted from each subclone. Then, a PCR reaction for amplifying a region containing a target site (exon 3) of C1202-ex3-g1, which was sgRNA used, was performed. Thereafter, a base sequence was analyzed by Sanger sequence.

[0320] FIG. 13(a) is a table showing a base mutation pattern of each clone recovered. In FIG. 13(a), “−” indicates that it had a deletion mutation, and “+” indicates that it had an insertion mutation. As a result, it was revealed that some insertion deletion mutation (Indel mutation) occurred near the target site of sgRNA. From among the clones in which the Indel mutation had occurred, #1 cells having frameshift mutation were selected.

[0321] Then, B5201-ex3-g2 (where a target base sequence is set forth in SEQ ID NO: 51) specific to the B*52:01 allele was introduced, as sgRNA, into the #1 cells in which the C*12:02 allele was knocked out so that the B*52:01 allele was knocked out. Thereby, subclones of 12 strains (clones #1-1 to #1-12) were obtained. The cells were not sorted because the anti-HLA-B52 allele-specific antibody was not available.

[0322] Subsequently, genomic DNA was extracted from each subclone. Then, a PCR reaction for amplifying a region containing a target site (exon 3) of B5201-ex3-g2, which was sgRNA used, was performed. Thereafter, a base sequence was analyzed by Sanger sequence.

[0323] FIG. 13(b) is a table showing a base mutation pattern of each clone recovered. In FIG. 13(b), “Mut” indicates that it had a substitution mutation, “WT” indicates that it was a wild-type base sequence, and “−” had a deletion mutation. As a result, it was revealed that some mutation occurred near the target site of sgRNA. FIG. 13(c) shows a base sequence of a strain #1-1 as a representative example.

### Experimental Example 11

### (HLA-Allele-Specific Knockout 5)

[0324] By disrupting the HLA allele of 604B1 iPS cells having the HLA haplotype shown in Table 14, low-antigenic cells were produced in which a rejection reaction was reduced in a case where the cells were allogeneically transplanted into a recipient C having a hypothetical HLA haplotype shown in Table 15. HLA haplotypes shown in Table 15 are HLA haplotypes of peripheral blood mononuclear cells (PBMC, type “LP_266,” CTL).

[0325] As shown in Tables 14 and 15, 604B1 iPS cells had A*01:01 allele, B*37:01 allele, and C*06:02 allele. In addition, these HLA alleles are not present in the recipient C. Accordingly, in a case where the 604B1 iPS cells or cells differentiation-induced from the 604B1 iPS cells are transplanted into the recipient, T cells of the recipient attack the cells and immune rejection occurs.

[0326] For this reason, in order to reduce a rejection reaction, the HLA alleles that are present in the donor cells but not present in the recipient C, that is, the A*01:01 allele, the B*37:01 allele, and the C*06:02 allele, are disrupted such that cells do not express an HLA protein specific to donor cells.

TABLE 14
HLA haplotype of 604B1 iPS cell

| HLA-A | | HLA-B | | HLA-C | |
|---|---|---|---|---|---|
| A*01:01 | A*24:02 | B*07:02 | B*37:01 | C*06:02 | C*07:02 |

TABLE 15
HLA haplotype of virtual recipient C (PBMC “LP_266,” CTL)

| HLA-A | | HLA-B | | HLA-C | |
|---|---|---|---|---|---|
| A*03:01 | A*24:02 | B*07:02 | B*40:02 | C*03:05 | C*07:02 |

[0327] A0101-ex3-g2 (where a target base sequence is set forth in SEQ ID NO: 46) which was specific to the *01:01 allele was used as sgRNA, and the A*01:01 allele of 604B1 iPS cells was knocked out in the same manner as in Experimental Example 9. Subsequently, C0602-ex3-g1 (where a target base sequence is set forth in SEQ ID NO: 52), which was an sgRNA and was specific to the C*06:02 allele, was introduced into the cells to knock out the C*06:02 allele, and subclones of nine strains were obtained.

[0328] Subsequently, genomic DNA was extracted from each subclone. Then, a PCR reaction for amplifying a region containing a target site (exon 3) of A0101-ex3-g2, which is the sgRNA used and a region containing a target site (exon 3) of C0602-ex3-g1 was performed. Thereafter, a base sequence was analyzed by Sanger sequence.

[0329] FIG. 14(a) is a table showing a base mutation pattern of each clone recovered. In FIG. 14(a), “WT” indicates that it was a wild-type base sequence, “−” indicates that it had a deletion mutation, and “+” indicates that it had an insertion mutation. As a result, a clone having some insertion deletion mutation (Indel mutation) near the target site of sgRNA was obtained. In FIG. 14(b), the base sequence is shown as a representative example of a clone #3 in which frameshift mutation had occurred among clones in which Indel mutation had occurred.

[0330] Subsequently, B-ex2-g1 (where a target base sequence is set forth in SEQ ID NO: 53) specific to the HLA-B allele was introduced, as sgRNA, into the clone #3 in which the A*01:01 allele and the C*06:02 allele were knocked out to test whether or not a clone in which only the B*37:01 allele was knocked out could be obtained. B-ex2-g1 is an sgRNA targeting both B*37:01 allele and B*07:02 allele.

[0331] Subsequently, iPS cells were stimulated with 50 ng/mL of IFN-γ for 48 hours to induce the expression of HLA protein. Subsequently, iPS cells were stained with an anti-HLA-B7 antibody (type “MCA986,” Bio-Rad), and analysis was performed by flow cytometry.

[0332] FIG. 15(a) is a graph showing results of flow cytometric analysis. In FIG. 15(a), “No stain” indicates the analysis results of iPS cells that were not stained with an antibody, “No transfection” indicates the analysis results of iPS cells into which sgRNA was not introduced, and “B-ex2-g1” indicates the analysis results of iPS cells into which the sgRNA was introduced and in which the HLA-B allele was knocked out.

[0333] In addition, single cell sorting was performed from a cell population in which an HLA-B7 protein was positive, and subclones of 12 strains (clones #3-1 to #3-12) were recovered. Subsequently, genomic DNA was extracted from each subclone. Next, a PCR reaction was performed for respectively amplifying a target B*37:01 allele and a non-target B*07:02 allele of a region containing a target site (exon 2) of B-ex2-g1, which is the sgRNA used. Thereafter, a base sequence was analyzed by Sanger sequence.

[0334] FIG. 15(b) is a table showing a base mutation pattern of each clone recovered. In FIG. 13(b), “Mut” indicates that it had a substitution mutation, “WT” indicates that it was a wild-type base sequence, “−” had a deletion mutation, and “+” indicates that it had an insertion mutation. As a result, a clone having some insertion deletion mutation (Indel mutation) near the target site of sgRNA was obtained. In FIG. 15(c), base sequences of two strains (clones #3-11 and #3-12) are shown as representative examples among the clones in which the Indel mutation occurs only in the B*37:01 allele.

### Experimental Example 12

### (HLA-Allele-Specific Knockout 6)

[0335] By disrupting an HLA allele of 604B1 iPS cells having an HLA haplotype shown in Table 16, cells in which all three genetic loci of an HLA-A allele, an HLA-B allele, and an HLA-C allele were knocked out were produced. FIG. 16(a) is a diagram showing a target site of an sgRNA used in the present experimental example.

TABLE 16
HLA haplotype of 604B1 iPS cell

| HLA-A | | HLA-B | | HLA-C | |
|---|---|---|---|---|---|
| A*01:01 | A*24:02 | B*07:02 | B*37:01 | C*06:02 | C*07:02 |

[0336] The B*07:02 allele, B*37:01 allele, C*06:02 allele, and C*07:02 allele of 604B1 iPS cells were knocked out in the same manner as in Experimental Example 9 using, as sgRNA, BC-ex2-g1 (where a target base sequence is set forth in SEQ ID NO: 54) capable of targeting both HLA-B allele and HLA-C allele.

[0337] Then, iPS cells were stimulated with 50 ng/mL IFN-γ for 48 hours and subjected to flow cytometric analysis to examine the expression of HLA-B protein and HLA-C protein. FIG. 16(b) is a graph showing the results of flow cytometry. In FIG. 16(b), “No stain” indicates the analysis results of iPS cells that were not stained with an antibody, “No transfection” indicates the analysis results of iPS cells into which sgRNA was not introduced, and “BC-ex2-g1” indicates the analysis results of iPS cells into which the sgRNA was introduced and in which both the HLA-B allele and the HLA-C allele were knocked out.

[0338] Subsequently, a cell population in which both the HLA-B protein and the HLA-C protein was negative was sorted and recovered. Subsequently, A-ex3-g1 (where a target base sequence is set forth in SEQ ID NO: 55) capable of targeting both alleles of an HLA-A gene was introduced into the recovered cell population, and the A*01:01 allele and the A*24:02 allele were knocked out.

[0339] Then, iPS cells were stimulated with 50 ng/mL IFN-γ for 48 hours and subjected to flow cytometric analysis to examine the expression of HLA-A protein, HLA-B protein, and HLA-C protein. FIG. 16(c) is a graph showing the results of flow cytometry. In FIG. 16(c), “No stain” indicates the analysis results of iPS cells that were not stained with an antibody, “No transfection” indicates the analysis results of iPS cells into which sgRNA was not introduced, and “A-ex3-g1” indicates the analysis results of iPS cells into which the sgRNA was introduced and in which the HLA-A allele was knocked out.

[0340] Subsequently, single cell sorting of a cell population in which HLA-A protein, HLA-B protein, and HLA-C protein were all negative was performed to recover subclones of 8 strains. Subsequently, genomic DNA was extracted from each subclone. Then, a PCR reaction for respectively amplifying a region containing a target site which was sgRNA used, was performed. Thereafter, a base sequence was analyzed by Sanger sequence.

[0341] FIG. 17(a) is a table showing a base mutation pattern of one of the recovered clones (clone #1). In FIG. 17(a), “−” indicates that it had a deletion mutation, and “+” indicates that it had an insertion mutation. As a result, it was confirmed that a clone could be obtained, in which an insertion deletion mutation (Indel mutation) had occurred in all of the A*01:01 allele, A*24:02 allele, B*07:02 allele, B*37:01 allele, C*06:02 allele, and C*07:02 allele. FIG. 17(b) shows a base sequence of each HLA allele of the clone #1. In FIG. 17(b), “WT” indicates a wild-type base sequence.

### Experimental Example 13

### (HLA-Allele-Specific Knockout 7)

[0342] By disrupting an HLA allele of 585A1 iPS cells having an HLA haplotype shown in Table 17, cells in which the HLA-A allele and the HLA-B allele were knocked out and only one of the HLA-C allele was knocked out were produced.

TABLE 17
HLA haplotype of 585A1 iPS cell

| HLA-A | | HLA-B | | HLA-C | |
|---|---|---|---|---|---|
| A*24:02 | A*24:02 | B*07:02 | B*52:01 | C*07:02 | C*12:02 |

[0343] The A*24:02 allele, B*07:02 allele, and B*52:01 allele of 585A1 iPS cells were knocked out in the same manner as in Experimental Example 9 using, as sgRNA, A-ex3-g1 capable of targeting the HLA-A allele (where a target base sequence is set forth in SEQ ID NO: 55) and B-ex2-g1 capable of targeting the HLA-B allele (where a target base sequence is set forth in SEQ ID NO: 53).

[0344] Then, iPS cells were stimulated with 50 ng/mL IFN-γ for 48 hours and subjected to flow cytometric analysis to examine the expression of HLA-A24 antigen and HLA-B7 antigen. FIG. 18(a) is a graph showing results of flow cytometry.

[0345] Subsequently, single cell sorting was performed on a cell population in which both HLA-A24 antigen and HLA-B7 antigen were negative, and subclones of 10 strains were recovered. Subsequently, genomic DNA was extracted from each subclone. Then, a PCR reaction for respectively amplifying a region containing a target site which was sgRNA used, was performed. Thereafter, a base sequence was analyzed by Sanger sequence.

[0346] FIG. 18(b) is a table showing a base mutation pattern of each clone recovered. In FIG. 18(b), “WT” indicates that it was a wild-type base sequence, “−” had a deletion mutation, “+” indicates that it had an insertion mutation, and “?” indicates that it could not be determined. As a result, a clone #3 was selected in which it was revealed that insertion deletion mutation (Indel mutations) had occurred in all of the A*24:02 allele, B*07:02 allele, and B*52:01 allele. FIG. 18(c) shows a base sequence of the clone #3.

[0347] Subsequently, C1202-ex3-g1 (where a target base sequence is set forth in SEQ ID NO: 50) specific to the C*12:02 allele was introduced into the clone #3, and the C*12:02 allele was knocked out. Subsequently, subclones of four strains (clones #3-1 to #3-4) were recovered. Subsequently, genomic DNA was extracted from each subclone. Subsequently, a PCR reaction for respectively amplifying the C*07:02 allele and the C*12:02 allele was performed. Thereafter, the base sequence was analyzed by Sanger sequence.

[0348] FIG. 18(d) is a table showing a base mutation pattern of each clone recovered. In FIG. 18(d), “WT” indicates that it was a wild-type base sequence, and “−” indicates that it had a deletion mutation. As a result, it was confirmed that the C*07:02 allele remained and clones of three strains (clones #3-1, #3-2, and #3-3) in which an insertion deletion mutation (Indel mutation) had occurred in the C*12:02 allele were obtained. FIG. 18(e) shows a base sequence of a clone #3-1 as a representative example.

### Experimental Example 14

### (HLA-Allele-Specific Knockout 8)

[0349] By disrupting an HLA allele of 604B1 iPS cells having an HLA haplotype shown in Table 18, cells in which the HLA-A allele and HLA-B allele were knocked out were produced.

TABLE 18
HLA haplotype of 604B1 iPS cell

| HLA-A | | HLA-B | | HLA-C | |
|---|---|---|---|---|---|
| A*01:01 | A*24:02 | B*07:02 | B*37:01 | C*06:02 | C*07:02 |

[0350] The A*01:01 allele, A*24:02 allele, B*07:02 allele, and B*37:01 allele of 604B1 iPS cells were knocked out in the same manner as in Experimental Example 9 using, as sgRNA, A-ex3-g1 capable of targeting the HLA-A allele (where a target base sequence is set forth in SEQ ID NO: 55) and B-ex2-g1 capable of targeting the HLA-B allele (where a target base sequence is set forth in SEQ ID NO: 53).

[0351] Then, iPS cells were stimulated with 50 ng/mL IFN-γ for 48 hours and subjected to flow cytometric analysis to examine the expression of HLA-A24 antigen and HLA-B7 antigen. FIG. 19(a) is a graph showing results of flow cytometry. In FIG. 19(a), “No stain” indicates the analysis results of iPS cells that were not stained with an antibody, “No transfection” indicates the analysis results of iPS cells into which sgRNA was not introduced, and “A-ex2-g1” and “B-ex2-g1” indicate the analysis results of iPS cells into which these sgRNAs were introduced and in which both the HLA-A allele and the HLA-B allele were knocked out.

[0352] Subsequently, a cell population in which both HLA-A24 antigen and HLA-B7 antigen were negative was sorted and recovered, and furthermore, the expression of HLA-A1 antigen was examined. FIG. 19(b) is a graph showing the results of flow cytometry. In FIG. 19(b), “No stain” indicates the analysis results of the iPS cells not stained with an antibody, and “HLA-A24, B7 (−) sorted” indicates the analysis results of a cell population in which both HLA-A24 antigen and HLA-B7 antigen were negative.

[0353] Subsequently, a cell population in which HLA-A1 antigen was negative was sorted and recovered, and subclones of 23 strains were recovered. Subsequently, genomic DNA was extracted from each subclone. Then, a PCR reaction for respectively amplifying a region containing a target site which was sgRNA used, was performed. Thereafter, a base sequence of seven strains was analyzed by Sanger sequence.

[0354] FIG. 19(c) is a table showing a base mutation pattern of each clone recovered. In FIG. 19(c), “WT” indicates that it was a wild-type base sequence, “−” indicates that it had a deletion mutation, and “+” indicates that it had an insertion mutation. As a result, it became clear that clones of six strains could be obtained in which all of the A*01:01 allele, A*24:02 allele, B*07:02 allele, and B*37:01 allele had an insertion deletion mutation (Indel mutation). A base sequence of a clone #4 is shown in FIG. 19(d) as a representative example.

### Experimental Example 15

### (HLA-Allele-Specific Knockout 9)

[0355] By disrupting an HLA allele of 1383D2 iPS cells having an HLA haplotype shown in Table 19, cells in which all three genetic loci of an HLA-A allele, an HLA-B allele, and an HLA-C allele were knocked out were produced. FIG. 20(a) is a diagram showing a target site of an sgRNA used in the present experimental example.

TABLE 19
HLA haplotype of 1383D2 iPS cell

| HLA-A | | HLA-B | | HLA-C | |
|---|---|---|---|---|---|
| A*02:07 | A*32:01 | B*15:02 | B*51:01 | C*08:01 | C*14:02 |

[0356] The B*15:02 allele, B*51:01 allele, C*08:01 allele, and C*14:02 allele of 1383D2 iPS cells were knocked out in the same manner as in Experimental Example 9 using, as sgRNA, BC-ex2-g1 (where a target base sequence is set forth in SEQ ID NO: 54) capable of targeting both HLA-B allele and HLA-C allele.

[0357] Then, iPS cells were stimulated with 50 ng/mL IFN-γ for 48 hours and subjected to flow cytometric analysis to examine the expression of HLA-B protein and HLA-C protein. FIG. 20(b) is a graph showing the results of flow cytometry. In FIG. 20(b), “No stain” indicates the analysis results of iPS cells that were not stained with an antibody, “No transfection” indicates the analysis results of iPS cells into which sgRNA was not introduced, and “BC-ex2-g1” indicates the analysis results of iPS cells into which the sgRNA was introduced and in which both the HLA-B allele and the HLA-C allele were knocked out.

[0358] Subsequently, a cell population in which both the HLA-B protein and the HLA-C protein was negative was sorted and recovered. Subsequently, A-ex3-g1 (where a target base sequence is set forth in SEQ ID NO: 55) capable of targeting both alleles of an HLA-A gene was introduced into the recovered cell population, and the A*02:07 allele and the A*32:01 allele were knocked out.

[0359] Then, iPS cells were stimulated with 50 ng/mL IFN-γ for 48 hours and subjected to flow cytometric analysis to examine the expression of HLA-A protein, HLA-B protein, and HLA-C protein.

[0360] FIG. 20(c) is a graph showing the results of flow cytometry. In FIG. 20(c), “No stain” indicates the analysis results of iPS cells that were not stained with an antibody, “No transfection” indicates the analysis results of iPS cells into which sgRNA was not introduced, and “A-ex3-g1” indicates the analysis results of iPS cells into which the sgRNA was introduced and in which the HLA-A allele was knocked out. As a result, the presence of a cell population in which all of HLA-A protein, HLA-B protein, and HLA-C protein were negative was confirmed.

### Experimental Example 16

### (Modification of HLA Allele)

[0361] An examination was conducted to modify the A*02:07 allele of 1383D2 iPS cells having an HLA haplotype shown in Table 20 into the A*01:01 allele by genome editing.

TABLE 20
HLA haplotype of 1383D2 iPS cell

| HLA-A | | HLA-B | | HLA-C | |
|---|---|---|---|---|---|
| A*02:07 | A*32:01 | B*15:02 | B*51:01 | C*08:01 | C*14:02 |

[0362] First, a double-regulated Cas9 expression vector and an sgRNA expression vector, both of which are piggyBac transposon vectors, were introduced into 1383D2 iPS cells. Drug selection was performed for 5 days using Puromycin (Cat. No. 29455-54, NACALAI TESQUE, INC.) at a final concentration of 1 to 15 μg/mL or hygromycin B (Cat. No. 10687-010, Thermo Fisher Scientific) at a final concentration of 100 to 200 μg/mL. Thereby, a cell population into which the chromosome was stably introduced was obtained.

[0363] The double-regulated Cas9 expression vector is a Cas9 expression vector capable of controlling both expression induction and intracellular localization (Ishida et al., Site-specific randomization of the endogenous genome by a regulatable CRISPR-Cas9 piggyBac system in human cells, Sci. Rep., 8: 310, 2018). In the present experimental example, a double-regulated Cas9 expression vector capable of inducing expression of a fusion protein of Cas9 protein and glucocorticoid receptor (GR) (hereinafter referred to as a “Cas9-GR protein”) by adding doxycycline (Dox) to a medium of cells, and capable of translocating Cas9-GR into the nucleus by adding dexamethasone (Dex) to the medium of cells, was used. In addition, as the sgRNA, A0207-ex3-g1 (where a target base sequence is set forth in SEQ ID NO: 3) was used.

[0364] FIG. 21(a) and FIG. 21(b) are schematic diagrams illustrating homologous recombination in the present experimental example. Then, in order to induce homologous recombination, single-stranded DNA (where a target base sequence is set forth in SEQ ID NO: 56) encoding a region containing exons 1 to 3 of the A*01:01 allele was produced.

[0365] Specifically, first, using genomic DNA of 604B1 iPS cells as a template, a portion from 67 bases upstream of exon 1 to 1247 bases downstream of exon 3 of the A*01:01 allele was amplified by PCR using a primer shown in Table 21, and integrated into a pENTR plasmid to produce a pENTR vector.

TABLE 21

| | | SEQ |
|---|---|---|
| | | ID |
| Primer name | Base sequence | NO. |
| 604B1-HLA-A-be-ex1 + | ccaattcagtcgacgGTCGCGGTCGCTG | 57 |
| 15 bp-fwd | TTCTAA | |
| 604B1-HLA-A-in3 + | gtctagatatctcgaTCATCAGTATTCG | 58 |
| 15 bp-rev | AGGGATCGTCT | |

[0366] Subsequently, this plasmid DNA was treated with nicking endonuclease Nb. BsrD1 enzyme (Model number “R0648S,” New England Biolabs), agarose electrophoresis was performed under formamide denaturing conditions, the corresponding DNA band was cut out and purified, and thereby a desired single-stranded DNA donor (lssDNA donor, SEQ ID NO: 56) was prepared.

[0367] Subsequently, a PENTR vector (dsDNA donor) in a double-stranded DNA state and prepared single-stranded DNA (lssDNA donor, SEQ ID NO: 56) were respectively introduced into 1383D2 iPS cells, Dox and Dex were added at final concentrations of 2 μM and 1 μM, respectively, and homologous recombination was induced by genome editing.

[0368] Then, respective iPS cells were stimulated with 50 ng/mL IFN-γ for 48 hours and subjected to flow cytometric analysis to examine the expression of HLA-A2 antigen and HLA-A1 antigen.

[0369] FIG. 21(c) is a graph showing the results of flow cytometry. In FIG. 20(c), “No stain” indicates the analysis results of iPS cells that were not stained with an antibody, “No Dox/Dex” indicates the analysis results of iPS cells that did not induce Cas9 expression, “dsDNA donor” indicates the analysis results of iPS cells in which a double-stranded DNA donor was introduced to induce homologous recombination, and “IssDNA donor” indicates the analysis results of iPS cells in which a single-stranded DNA donor was introduced to induce homologous recombination.

[0370] As a result, a ratio of negative A2 antigen and positive A1 antigen was 0.2% in a case where double-stranded DNA was used as a donor, and was 1.6% in a case where single-stranded DNA was used as a donor.

[0371] Subsequently, a cell population in which the A2 antigen became negative and the A1 antigen became positive by homologous recombination using a single-stranded DNA donor was sorted by flow cytometry, and a base sequence of the HLA-A genetic locus was analyzed for the cell population and subclones after single cell sorting.

[0372] FIG. 22(a) is a diagram showing the results of analyzing a base sequence of the cell population as it is. In FIG. 22(a), “Bulk” indicates the results obtained by analyzing the cell population as it is. As a result, it was revealed that cells in which part of the A*02:07 genetic locus (particularly a 5′ side of exon 2 and exon 3) was modified to an A*01:01 gene were present in combination.

[0373] In addition, FIG. 22(b) is a diagram showing the results of analyzing a base sequence of a typical single cell-sorted subclone (clone #2). As a result, it was revealed that part of the A*02:07 genetic locus was modified to the A*01:01 gene.

### Experimental Example 17

### (Production 1 of B2M Knockout iPS Cell)

[0374] 1383D2 iPS cells were transfected with a plasmid vector expressing Cas9 and B2M-specific sgRNA. As sgRNA, B2M-g1 (where a target base sequence is set forth in SEQ ID NO: 59) and B2M-g2 (where a target base sequence is set forth in SEQ ID NO: 60) were used.

[0375] Subsequently, cells stimulated with 50 ng/mL IFN-γ for 48 hours were stained with an anti-HLA-ABC antibody, and flow cytometric analysis was performed.

[0376] FIG. 23(a) is a graph showing results of flow cytometry. In FIG. 23(a), “No stain” indicates the analysis results of iPS cells that were not stained with an antibody, “No transfection” indicates the analysis results of iPS cells into which sgRNA was not introduced, and “B2M-g1” and “B2M-g2” indicate the analysis results of iPS cells into which the sgRNA was introduced and in which the B2M allele was knocked out.

[0377] As a result, a proportion of the cell population in which all of HLA-A protein, HLA-B protein, and HLA-C protein were negative was 2.8% in a case where B2M-g1 (where a target base sequence is set forth in SEQ ID NO: 59) was used as sgRNA. Furthermore, a proportion thereof was 6.9% in a case where B2M-g2 (where a target base sequence is set forth in SEQ ID NO: 60) was used as sgRNA.

[0378] Subsequently, single cell sorting was performed from a cell population in which HLA-A, HLA-B, and HLA-C were all negative, which were obtained by the introduction of B2M-g2 sgRNA. Thereby, subclones of two strains of clones #1 and #2 were obtained.

[0379] The obtained subclones of two strains were stimulated again with IFN-γ for 48 hours, and flow cytometric analysis was performed. FIG. 23(b) is a graph showing the results of flow cytometry. In FIG. 23(b), “B2M-KO #1” indicates the results of the clone #1, and “B2M-KO #2” indicates the results of the clone #2. As a result, it was confirmed that HLA-A, HLA-B, and HLA-C were all negative in all the clones.

[0380] Subsequently, the B2M gene of the clone #1 was amplified by PCR to check a base sequence, and it was confirmed that an insertion deletion mutation (Indel mutation) had been introduced. FIG. 23(c) shows a base sequence of the B2M allele of the clone #1. In FIG. 23(c), “WT” indicates a wild-type base sequence.

### Experimental Example 18

### (Production 2 of B2M Knockout iPS Cell)

[0381] 604B1 iPS cells were subjected to the same operation as in Experimental Example 17 to knock out the B2M allele. B2M-g2 (where a target base sequence is set forth in SEQ ID NO: 60) was used as sgRNA.

[0382] Subsequently, cells stimulated with 50 ng/mL IFN-γ for 48 hours were stained with an anti-HLA-ABC antibody, and flow cytometric analysis was performed.

[0383] FIG. 24(a) is a graph showing results of flow cytometry. In FIG. 24(a), “No stain” indicates the analysis results of iPS cells that were not stained with an antibody, “No transfection” indicates the analysis results of iPS cells into which sgRNA was not introduced, and “B2M-g2” indicates that these sgRNAs were introduced to knock out the B2M allele. As a result, it became clear that a cell population in which all of HLA-A protein, HLA-B protein, and HLA-C protein were negative could be obtained.

[0384] Subsequently, single cell sorting was performed from a cell population in which HLA-A, HLA-B, and HLA-C were all negative. Thereby, subclones of four strains of clones #1, #2, #3, and #4 were obtained.

[0385] Then, the B2M gene of these subclones was amplified by PCR to check a base sequence. FIG. 24(b) is a diagram showing results of analysis of a base sequence. As a result, it was confirmed that an insertion deletion mutation (Indel mutation) was introduced into all the subclones.

### Experimental Example 19

### (Test 1 of T Cell Activation)

[0386] (1) 604B1 iPS cells having an HLA haplotype shown in Table 22, (2) a clone #8 which was produced in Experimental Example 8 and in which the A*01:01 and B*07:02 alleles of the 604B1 iPS cells had been knocked out, (3) same clone #10, (4) 1383D2 iPS cells having an HLA haplotype in Table 23, and (5) 604B1 iPS cells (clone #1) which were produced in Experimental Example 18 and in which the B2M allele had been knocked out were respectively differentiation-induced into blood-cell-like cells derived from embryoid body (EB).

TABLE 22
HLA haplotype of 604B1 iPS cell

| HLA-A | | HLA-B | | HLA-C | |
|---|---|---|---|---|---|
| A*01:01 | A*24:02 | B*07:02 | B*37:01 | C*06:02 | C*07:02 |

TABLE 23
HLA haplotype of 1383D2 iPS cell

| HLA-A | | HLA-B | | HLA-C | |
|---|---|---|---|---|---|
| A*02:07 | A*32:01 | B*15:02 | B*51:01 | C*08:01 | C*14:02 |

[0387] Subsequently, CD8-positive T cells recovered by sorting from peripheral blood mononuclear cells having an HLA haplotype shown in Table 24 (PBMC, type “LP_194,” CTL, corresponding to the above-mentioned recipient A) were stained with CFSE (Cayman Chemical Co., Ltd.). The cells were co-cultured with EB-derived blood-cell-like cells differentiated from the respective cells of (1) to (5) in the presence of IL-2 and IFN-γ for 8 days.

TABLE 24
HLA haplotype of PBMC (LP_194, CTL)

| HLA-A | | HLA-B | | HLA-C | |
|---|---|---|---|---|---|
| A*24:02 | A*24:02 | B*37:01 | B*39:06 | C*06:02 | C*07:02 |

[0388] After co-culture, flow cytometric analysis was performed to examine fluorescence of CFSE. FIGS. 25(a) to 25(e) are graphs showing results of flow cytometry. FIGS. 25(a) to 25(e) show the results of CD8-positive T cells co-cultured with EB-derived blood-cell-like cells differentiated from the respective cells of (1) to (5). As a result, it was confirmed that only a T cell population that specifically recognized an HLA antigen of each of the iPS cells proliferated, and CFSE became negative.

### Experimental Example 20

### (Test 2 of T Cell Activation)

[0389] (1) 585A1 iPS cells having an HLA haplotype shown in Table 25, (2) a clone #2 which was produced in Experimental Example 9 and in which the B*07:02 and C*07:02 alleles of the 585A1 iPS cells had been knocked out, (3) same clone #11, (4) same clone #26, (5) 1383D2 iPS cells having an HLA haplotype in Table 26, and (6) 604B1 iPS cells (clone #1) which were produced in Experimental Example 18 and in which the B2M had been knocked out were respectively differentiation-induced into EB-derived blood-cell-like cells.

TABLE 25
HLA haplotype of 585A1 iPS cell

| HLA-A | | HLA-B | | HLA-C | |
|---|---|---|---|---|---|
| A*24:02 | A*24:02 | B*07:02 | B*52:01 | C*07:02 | C*12:02 |

TABLE 26
HLA haplotype of 1383D2 iPS cell

| HLA-A | | HLA-B | | HLA-C | |
|---|---|---|---|---|---|
| A*02:07 | A*32:01 | B*15:02 | B*51:01 | C*08:01 | C*14:02 |

[0390] Subsequently, CD8-positive T cells recovered by sorting from peripheral blood mononuclear cells having an HLA haplotype shown in Table 27 (PBMC, type “2010113203,” Wako, corresponding to the above-mentioned recipient B) were stained with CFSE (Cayman Chemical Co., Ltd.). The cells were co-cultured with EB-derived blood-cell-like cells differentiated from the respective cells of (1) to (6) in the presence of 1L-2 and IFN-γ for 8 days.

TABLE 27
HLA haplotype of PBMC (“2010113203,” Wako)

| HLA-A | | HLA-B | | HLA-C | |
|---|---|---|---|---|---|
| A*24:02 | A*24:02 | B*40:06 | B*52:01 | C*08:01 | C*12:02 |

[0391] After co-culture, flow cytometric analysis was performed to examine fluorescence of CFSE. FIGS. 26(a) to 26(f) are graphs showing results of flow cytometry. FIGS. 26(a) to 26(f) show the results of CD8-positive T cells co-cultured with EB-derived blood-cell-like cells differentiated from the respective cells of (1) to (6). As a result, it was confirmed that a T cell population that specifically recognized an HLA antigen of each of the iPS cells proliferated, and CFSE became negative.

### Experimental Example 21

### (Test 3 of T Cell Activation)

[0392] (1) 604B1 iPS cells having an HLA haplotype shown in Table 28, (2) a clone #3-11 which was produced in Experimental Example 11 and in which the A*01:01, B*37:01, and C*06:02 alleles of the 604B1 iPS cells had been knocked out, (3) same clone #3-12, (4) 1383D2 iPS cells having an HLA haplotype in Table 29, and (5) 604B1 iPS cells (clone #1) which were produced in Experimental Example 18 and in which the B2M had been knocked out were respectively differentiation-induced into EB-derived blood-cell-like cells.

TABLE 28
HLA haplotype of 604B1 iPS cell

| HLA-A | | HLA-B | | HLA-C | |
|---|---|---|---|---|---|
| A*01:01 | A*24:02 | B*07:02 | B*37:01 | C*06:02 | C*07:02 |

TABLE 29
HLA haplotype of 1383D2 iPS cell

| HLA-A | | HLA-B | | HLA-C | |
|---|---|---|---|---|---|
| A*02:07 | A*32:01 | B*15:02 | B*51:01 | C*08:01 | C*14:02 |

[0393] Subsequently, CD8-positive T cells recovered by sorting from peripheral blood mononuclear cells having an HLA haplotype shown in Table 30 (PBMC, type “LP_266,” CTL, corresponding to the above-mentioned recipient C) were stained with CFSE (Cayman Chemical Co., Ltd.). The cells were co-cultured with EB-derived blood-cell-like cells differentiated from the respective cells of (1) to (5) in the presence of IL-2 and IFN-γ for 8 days.

TABLE 30
HLA haplotype of PBMC (LP_266, CTL)

| HLA-A | | HLA-B | | HLA-C | |
|---|---|---|---|---|---|
| A*03:01 | A*24:02 | B*07:02 | B*40:02 | C*03:05 | C*07:02 |

[0394] After co-culture, flow cytometric analysis was performed to examine fluorescence of CFSE. FIGS. 27(a) to 27(e) are graphs showing results of flow cytometry. FIGS. 27(a) to 27(e) show the results of CD8-positive T cells co-cultured with EB-derived blood-cell-like cells differentiated from the respective cells of (1) to (5). As a result, it was confirmed that a T cell population that specifically recognized an HLA antigen of each of the iPS cells proliferated, and CFSE became negative.

### Experimental Example 22

### (Preparation of HLA-Antigen-Reactive CD8-Positive T Cells)

[0395] CD8-positive T cells reactive with an HLA antigen of 604B1 iPS cells were prepared. Peripheral blood mononuclear cell (PBMC)-derived T cells were present in combination with T cells that recognized various antigens. Among these T cells, CD8-positive T cells reactive with the HLA antigen of 604B1 iPS cells were stimulated to proliferate and were recovered.

[0396] FIG. 28 is a schematic diagram showing a procedure of the present experimental example. As shown in FIG. 28, first, 604B1 iPS cells were differentiated into EB-derived blood-cell-like cells. The EB-derived blood-cell-like cells include CD45-positive leukocytes. Subsequently, CD8-positive T cells contained in PBMC were stained with CFSE (Cayman Chemical Co.) and co-cultured with EB-derived blood-cell-like cells differentiated from 604B1 iPS cells in the presence of IL-2 and IFN-γ for 8 days.

[0397] Subsequently, after co-culture, flow cytometric analysis was performed to examine fluorescence of CFSE. FIGS. 29(a) to 29(e) are graphs showing results of flow cytometry.

[0398] FIG. 29(a) shows the results of co-culturing a PBMC cell population with a PBMC cell population of allogeneic cells (allo), FIG. 29(b) shows the results of co-culturing the PBMC cell population with EB-derived blood-cell-like cells differentiated from 604B1 iPS cells, FIG. 29(c) shows the results of culturing only the PBMC cell population, FIG. 29(d) shows the results of co-culturing CD8-positive T cells recovered from the PBMC cell population by sorting with EB-derived blood-cell-like cells differentiated from 604B1 iPS cells, and FIG. 29(e) shows the results of culturing only CD8-positive T cells recovered from the PBMC cell population by sorting. As a result, it was confirmed that a T cell population that specifically recognized an incompatible HLA antigen proliferated, and CFSE became negative.

[0399] Subsequently, CD8-positive T cells that became CFSE-negative as shown in FIG. 29(d) were sorted and recovered. Thereby, T cells reactive with the HLA antigen of 604B1 iPS cells were obtained.

### Experimental Example 23

### (Test 1 of T Cell Cytotoxicity)

[0400] FIG. 30 is a schematic diagram showing a procedure of the present experimental example. First, (1) 604B1 iPS cells having an HLA haplotype shown in Table 31, (2) a clone #8 which was produced in Experimental Example 8 and in which the A*01:01 and B*07:02 alleles of the 604B1 iPS cells had been knocked out, (3) same clone #10, and (4) 1383D2 iPS cells (clone #1) which were produced in Experimental Example 17 and in which the B2M had been knocked out, were respectively differentiation-induced into cardiomyocytes.

TABLE 31
HLA haplotype of 604B1 iPS cell

| HLA-A | | HLA-B | | HLA-C | |
|---|---|---|---|---|---|
| A*01:01 | A*24:02 | B*07:02 | B*37:01 | C*06:02 | C*07:02 |

[0401] Subsequently, each cardiomyocyte was stimulated with IFN-γ to induce the expression of HLA protein. Subsequently, in order to perform a ⁵¹Cr release assay to be described later, ⁵¹Cr (chromium) was added to a medium and incorporated into each cardiomyocyte.

[0402] Subsequently, CD8-positive T cells reactive with the HLA antigen of 604B1 iPS cells prepared in Experimental Example 22 were added to the medium of each cardiomyocyte at various ratios to examine whether each cardiomyocyte was attacked. That is, the CD8 T cells reactive with the HLA antigen prepared in Experimental Example 22 were used as effector cells, and the above-described cardiomyocytes derived from iPS cells were used as target cells. A ratio of the number of CD8-positive T cells to be added was 0.625, 1.25, 2.5, 5, and 10 with respect to cardiomyocytes 1.

[0403] When cardiomyocytes are attacked by CD8-positive cells, the cells are damaged and ⁵¹Cr is released from the inside of the cells. Accordingly, by measuring ⁵¹Cr released into the medium, it is possible to determine whether or not each cardiomyocyte is attacked. This is called ⁵¹Cr release assay. An amount of ⁵¹Cr contained in the supernatant of the cardiomyocytes that had not been treated after labeling with ⁵¹Cr was defined as 0% Specific Lysis. A value obtained by subtracting an amount of ⁵¹Cr released in the supernatant when ⁵¹Cr-labeled cardiomyocytes were cultured in a normal medium from an amount of ⁵¹Cr released in the supernatant when ⁵¹Cr-labeled cardiomyocytes were treated by a surfactant (Triton-X) and killed was defined as 100% Specific Lysis.

[0404] FIG. 31 is a graph showing a ratio of each cardiomyocyte damaged and lysed. In FIG. 31, the symbol “*” indicates that there is a significant difference at P<0.05, “Non-edited” indicates the results of cardiomyocytes differentiation-induced the 604B1 iPS cells of (1), “A1⁻B7⁻#8” indicates the results of the cardiomyocytes differentiation-induced the clone #8 of (2), “A1⁻B7⁻#10” indicates the results of the cardiomyocytes differentiation-induced the clone #10 of (3), and “1383D2-B2M⁻#1” indicates the results of cardiomyocytes differentiation-induced the 1383D2 iPS cells (clone #1) of (4) in which B2M had been knocked out.

[0405] As a result, it was revealed that the cardiomyocytes differentiation-induced from the 604B1 iPS cells had a higher degree of injury when a proportion of CD8-positive T cells as effectors was increased.

[0406] In contrast, it was clarified that the cardiomyocytes differentiation-induced from the 1383D2 iPS cells in which B2M had been knocked out were not damaged even when a proportion of CD8-positive T cells as effectors was increased. Similarly, it was clarified that the cardiomyocytes differentiation-induced from the clones #8 and #10 in which the A*01:01 and B*07:02 alleles of 604B1 iPS cells were knocked out were not damaged even when a proportion of CD8-positive T cells as effectors was increased.

[0407] These results show that it is possible to reduce a rejection reaction in a case where cells were differentiation-induced and allogeneically transplanted by disrupting the HLA allele of iPS cells.

[0408] In addition, the fact that the respective iPS cells of (2) to (4) were able to be differentiation-induced into cardiomyocytes indicates that expression of HLA protein could be maintained by the IFN-γ treatment while maintaining pluripotency of pluripotent stem cells.

### Experimental Example 24

### (Test 2 of T Cell Cytotoxicity)

[0409] The iPS cells of (1) to (4) similar to those of Experimental Example 23 were differentiation-induced into EB-derived blood-cell-like cells, and ⁵¹Cr release assay was performed.

[0410] First, (1) 604B1 iPS cells, (2) a clone #8 which was produced in Experimental Example 7 and in which the A*01:01 and B*07:02 alleles of the 604B1 iPS cells had been knocked out, (3) same clone #10, and (4) 604B1 iPS cells (clone #1) which were produced in Experimental Example 18 and in which the B2M had been knocked out were respectively differentiation-induced into EB-derived blood-cell-like cells. The EB-derived blood-cell-like cells include blood cells.

[0411] Subsequently, CD8-positive T cells reactive with the HLA antigen of 604B1 iPS cells prepared in Experimental Example 22 were added to the medium of each EB-derived blood-cell-like cell at various ratios to examine whether each EB-derived blood-cell-like cell was attacked. That is, the CD8 T cells reactive with the HLA antigen prepared in Experimental Example 21 were used as effector cells, and the above-described EB-derived blood-cell-like cells were used as target cells. A ratio of the number of CD8-positive T cells to be added was 0.625, 1.25, 2.5, 5, 10, and 20 with respect to EB-derived blood-cell-like cells 1.

[0412] FIG. 32 is a graph showing a ratio of each EB-derived blood-cell-like cell damaged and lysed. In FIG. 32, the symbol “*” indicates that there is a significant difference at P<0.05, “Non-edited” indicates the results of EB-derived blood-cell-like cells differentiation-induced from the 604B1 iPS cells of (1), “A1⁻B7⁻#8” indicates the results of the EB-derived blood-cell-like cells differentiation-induced from the clone #8 of (2), “A1⁻B7⁻#10” indicates the results of the EB-derived blood-cell-like cells differentiation-induced from the clone #10 of (3), and “604B1-B2M⁻#1” indicates the results of EB-derived blood-cell-like cells differentiation-induced from the 604B1 iPS cells (clone #1) of (4) in which B2M had been knocked out.

[0413] As a result, it was revealed that the EB-derived blood-cell-like cells differentiation-induced from the 604B1 iPS cells had a higher degree of injury when a proportion of CD8-positive T cells as effectors was increased.

[0414] In contrast, it was clarified that the EB-derived blood-cell-like cells differentiation-induced from the 604B1 iPS cells in which B2M had been knocked out were not damaged even when a proportion of CD8-positive T cells as effectors was increased. Similarly, it was clarified that the EB-derived blood-cell-like cells differentiation-induced from the clones #8 and #10 in which the A*01:01 and B*07:02 alleles of 604B1 iPS cells were knocked out were not damaged even when a proportion of CD8-positive T cells as effectors was increased.

[0415] These results show that it is possible to reduce a rejection reaction in a case where cells were differentiation-induced and allogeneically transplanted by disrupting the HLA allele of iPS cells.

[0416] In addition, the fact that the respective iPS cells of (2) to (4) were able to be differentiation-induced into EB-derived blood-cell-like cells indicates that expression of HLA protein could be maintained by the IFN-γ treatment while maintaining pluripotency of pluripotent stem cells.

### Experimental Example 25

### (Test 3 of T Cell Cytotoxicity)

[0417] The same examination as in Experimental Example 24 was performed except that iPS cells different from those in Experimental Example 24 were used. First, (1) 585A1 iPS cells having an HLA haplotype shown in Table 32, (2) a clone #2 which was produced in Experimental Example 9 and in which the B*07:02 and C*07:02 alleles of the 585A1 iPS cells had been knocked out, (3) same clone #11, (4) same clone #26, and (5) 604B1 iPS cells (clone #1) which were produced in Experimental Example 18 and in which the B2M had been knocked out were respectively differentiation-induced into EB-derived blood-cell-like cells. The EB-derived blood-cell-like cells include blood cells.

TABLE 32
HLA haplotype of 585A1 iPS cell

| HLA-A | | HLA-B | | HLA-C | |
|---|---|---|---|---|---|
| A*24:02 | A*24:02 | B*07:02 | B*52:01 | C*07:02 | C*12:02 |

[0418] Subsequently, CD8-positive T cells as effectors derived from peripheral blood mononuclear cells having HLA haplotypes shown in Table 33 (corresponding to PBMC, type “2010113203,” Wako, the above-mentioned recipient B) were added to a medium of each EB-derived blood-cell-like cell at various ratios to examine whether or not each EB-derived blood-cell-like cell was attacked. As the effector cells, the CD8-positive T cells in CFB-negative PBMC shown in FIG. 26(a) of Experimental Example 20 were sorted and used. In addition, target cells were the above-mentioned EB-derived blood-cell-like cells. A ratio of the number of CD8-positive T cells to be added as effectors was 0.625, 1.25, 2.5, 5, 10, and 20 with respect to EB-derived blood-cell-like cells 1.

TABLE 33
HLA haplotype of PBMC (“2010113203,” Wako)

| HLA-A | | HLA-B | | HLA-C | |
|---|---|---|---|---|---|
| A*24:02 | A*24:02 | B*40:06 | B*52:01 | C*08:01 | C*12:02 |

[0419] FIG. 33 is a graph showing a ratio of each EB-derived blood-cell-like cell damaged and lysed. In FIG. 33, the symbol “*” indicates that there is a significant difference at P<0.05, “Non-edited” indicates the results of EB-derived blood-cell-like cells differentiation-induced from the 585A1 iPS cells of (1), “B7⁻C7⁻#2” indicates the results of the EB-derived blood-cell-like cells differentiation-induced from the clone #2 of (2), “B7⁻C7⁻#11” indicates the results of the EB-derived blood-cell-like cells differentiation-induced from the clone #11 of (3), “B7⁻C7⁻#26” indicates the results of the EB-derived blood-cell-like cells differentiation-induced from the clone #26 of (4), and “604B1-B2M⁻#1” indicates the results of EB-derived blood-cell-like cells differentiation-induced from the 604B1 iPS cells (clone #1) of (5) in which B2M had been knocked out.

[0420] As a result, it was revealed that the EB-derived blood-cell-like cells differentiation-induced from the 585A1 iPS cells had a higher degree of injury when a proportion of CD8-positive T cells as effectors was increased.

[0421] In contrast, it was clarified that the EB-derived blood-cell-like cells differentiation-induced from the 604B1 iPS cells in which B2M had been knocked out were not damaged even when a proportion of CD8-positive T cells as effectors was increased. Similarly, it was clarified that the EB-derived blood-cell-like cells differentiation-induced from the clones #2, #11, and #26 in which the B*07:02 and C*07:02 alleles of 585A1 iPS cells were knocked out were not damaged even when a proportion of CD8-positive T cells as effectors was increased.

[0422] These results show that it is possible to reduce a rejection reaction in a case where cells were differentiation-induced and allogeneically transplanted by disrupting the HLA allele of iPS cells.

[0423] In addition, the fact that the respective iPS cells of (2) to (5) were able to be differentiation-induced into EB-derived blood-cell-like cells indicates that expression of HLA protein could be maintained by the IFN-γ treatment while maintaining pluripotency of pluripotent stem cells.

### Experimental Example 26

### (Test 4 of T Cell Cytotoxicity)

[0424] The 604B1 iPS cells having HLA haplotypes shown in Table 34 and the 604B1 iPS cells (clone #1) which were produced in Experimental Example 18 and in which

[0425] B2M had been knocked out were mixed with cells obtained by labeling, with CFSE, peripheral blood mononuclear cells having an HLA haplotype shown in Table 35 (PBMC, type “LP_266,” CTL, corresponding to the above-mentioned recipient C). These cells were co-cultured for 7 days.

TABLE 34
HLA haplotype of 604B1 iPS cell

| HLA-A | | HLA-B | | HLA-C | |
|---|---|---|---|---|---|
| A*01:01 | A*24:02 | B*07:02 | B*37:01 | C*06:02 | C*07:02 |

TABLE 35
HLA haplotype of PBMC (LP_266, CTL)

| HLA-A | | HLA-B | | HLA-C | |
|---|---|---|---|---|---|
| A*03:01 | A*24:02 | B*07:02 | B*40:02 | C*03:05 | C*07:02 |

[0426] After co-culture, flow cytometric analysis was performed to examine fluorescence of CFSE. FIGS. 34(a) and 34(b) are graphs showing results of flow cytometry. In FIGS. 34(a) and 34(b), “604B1-B2M⁻#1” indicates the results of PBMC co-cultured with the 604B1 iPS cells (clone #1) in which B2M had been knocked out, and “604B1” indicates the results of PBMC co-cultured with the 604B1 iPS cells.

[0427] As a result, as shown in FIG. 34(a), 11.3% of CD8-positive and CSFE-negative T cells were contained in the PBMC co-cultured with the 604B1 iPS cells (clone #1) in which B2M had been knocked out. Furthermore, as shown in FIG. 34(b), 21.3% of CD8-positive and CSFE-negative T cells were contained in the PBMC co-cultured with the 604B1 iPS cells. Subsequently, from the PBMC co-cultured with the 604B1 iPS cells shown in FIG. 34(b), CD8-positive and CSFE-negative cells were sorted and recovered as effector CD8-positive T cells.

[0428] Subsequently, (1) 604B1 iPS cells; (2) clone #3-11 which was produced in Experimental Example 11 and in which A*01:01 allele, B*37:01 allele, and C*06:02 allele of the 604B1 iPS cells had been knocked out; and (3) the same clone #3-12 were respectively differentiation-induced into EB-derived blood-cell-like cells. The EB-derived blood-cell-like cells include blood cells.

[0429] Subsequently, the recovered effector CD8-positive T cells were added to the medium of each EB-derived blood-cell-like cell at various ratios to examine whether each EB-derived blood-cell-like cell was attacked. That is, target cells were EB-derived blood-cell-like cells that had been differentiation-induced from the cells of (1) to (3). A ratio of the number of CD8-positive T cells to be added as effectors was 0.625, 1.25, 2.5, 5, 10, and 20 with respect to EB-derived blood-cell-like cells 1.

[0430] FIG. 34(c) is a graph showing a ratio of each EB-derived blood-cell-like cell damaged and lysed. In FIG. 34(c), the symbol “*” indicates that there is a significant difference at P<0.05, “Non-edited” indicates the results of EB-derived blood-cell-like cells differentiation-induced from the 604B1 iPS cells of (1), “A1⁻B37⁻C6⁻#3-11” indicates the results of the EB-derived blood-cell-like cells differentiation-induced from the clone #3-11 of (2), and “A1⁻B37⁻C6⁻#3-12” indicates the results of the EB-derived blood-cell-like cells differentiation-induced from the clone #3-12 of (3).

[0431] As a result, it was revealed that the EB-derived blood-cell-like cells differentiation-induced from the 604B1 iPS cells had a higher degree of injury when a proportion of CD8-positive T cells as effectors was increased.

[0432] In contrast, it was clarified that the EB-derived blood-cell-like cells differentiation-induced from the clones #3-11 and #3-12 in which the A*01:01 allele, B*37:01 allele, and C′06:02 allele of 604B1 iPS cells were knocked out were not damaged even when a proportion of CD8-positive T cells as effectors was increased.

[0433] These results show that it is possible to reduce a rejection reaction in a case where cells were differentiation-induced and allogeneically transplanted by disrupting the HLA allele of iPS cells.

[0434] In addition, the fact that the respective iPS cells of (2) and (3) were able to be differentiation-induced into EB-derived blood-cell-like cells indicates that expression of HLA protein could be maintained by the IFN-γ treatment while maintaining pluripotency of pluripotent stem cells.

### Experimental Example 27

### (Reactivity Test 1 of NK Cells)

[0435] (1) 604B1 iPS cells having an HLA haplotype shown in Table 36, (2) a clone #8 which was produced in Experimental Example 8 and in which the A*01:01 and B*07:02 alleles of the 604B1 iPS cells had been knocked out, (3) same clone #10, (4) 1383D2 iPS cells having an HLA haplotype in Table 37, and (5) 604B1 iPS cells (clone #1) which were produced in Experimental Example 18 and in which the B2M had been knocked out were respectively differentiated into EB-derived blood-cell-like cells. The EB-derived blood-cell-like cells include CD45-positive leukocytes.

TABLE 36
HLA haplotype of 604B1 iPS cell

| HLA-A | | HLA-B | | HLA-C | |
|---|---|---|---|---|---|
| A*01:01 | A*24:02 | B*07:02 | B*37:01 | C*06:02 | C*07:02 |

TABLE 37
HLA haplotype of 1383D2 iPS cell

| HLA-A | | HLA-B | | HLA-C | |
|---|---|---|---|---|---|
| A*02:07 | A*32:01 | B*15:02 | B*51:01 | C*08:01 | C*14:02 |

[0436] In addition, CD56-positive cells (NK cells) were recovered from PBMC having an HLA haplotype shown in Table 38 (type “LP_194,” CTL, corresponding to the above-mentioned recipient A) by sorting. Subsequently, the recovered NK cells were co-cultured with each of differentiated CD45-positive leukocytes in the presence of the anti-CD107a antibody. As a result, when the NK cells were activated, they became CD107a-positive. After co-culture, flow cytometric analysis was performed to measure a percentage of activated NK cells.

TABLE 38
HLA haplotype of PBMC (LP_194, CTL)

| HLA-A | | HLA-B | | HLA-C | |
|---|---|---|---|---|---|
| A*24:02 | A*24:02 | B*37:01 | B*39:06 | C*06:02 | C*07:02 |

[0437] FIGS. 35(a) to 35(g) are graphs showing results of flow cytometric analysis. FIG. 35 (a) shows the results of culturing only NK cells and analyzing them. FIG. 35(b) shows the results of analysis of NK cells co-cultured with EB-derived blood-cell-like cells differentiation-induced from 604B1 iPS cells. FIG. 35(c) shows the results of analysis of NK cells co-cultured with EB-derived blood-cell-like cells differentiation-induced from the clone #8 in which the A*01:01 and B*07:02 alleles of 604B1 iPS cells were knocked out. FIG. 35(d) shows the results of analysis of NK cells co-cultured with EB-derived blood-cell-like cells differentiation-induced from the clone #10. FIG. 35(e) shows the results of analysis of NK cells co-cultured with EB-derived blood-cell-like cells differentiation-induced from 1383D2 iPS cells. FIG. 35(f) shows the results of analysis of NK cells co-cultured with EB-derived blood-cell-like cells differentiation-induced from 604B1 iPS cells in which B2M had been knocked out. FIG. 35(g) shows the results of analysis of NK cells co-cultured with K562 cells known not to express HLA antigen, as a positive control.

[0438] As a result, it was revealed that 5.9% of NK cells co-cultured with K562 cells were activated. In addition, it was revealed that 3.2% of NK cells co-cultured with EB-derived blood-cell-like cells differentiation-induced from 604B1 iPS cells in which B2M had been knocked out and which did not express HLA antigen were activated.

[0439] In contrast, in the clones #8 and #10 in which the A*01:01 and B*07:02 alleles of 604B1 iPS cells had been knocked out, expression of the other A*24:02 and B*37:01 alleles remained. Based on this result, it was revealed that activation of NK cells co-cultured with EB-derived blood-cell-like cells differentiation-induced therefrom was inhibited.

[0440] That is, it was revealed that cells in which B2M had been knocked out were significantly attacked by NK cells, whereas cells in which some HLA alleles remained were able to avoid attack by NK cells.

### Experimental Example 28

### (Confirmation Test 1 of Pluripotency)

[0441] For 1383D2 iPS cells and 604B1 iPS cells, (1) cells in an untreated state, (2) cells immediately after being treated with 50 ng/mL IFN-γ for 48 hours, and (3) cells 5 days after being treated with 50 ng/mL IFN-γ for 48 hours were respectively prepared, and mRNA was extracted. Then, after synthesizing cDNA using Reverse Tra Ase qPCR RT Master Mix (Toyobo), quantitative PCR was performed using a primer for amplifying human NANOG cDNA specifically expressed in pluripotent stem cells, and as a control of a total amount of mRNA, a primer for amplifying human ACTB cDNA.

[0442] The primer used for amplifying human NANOG cDNA and the primer used for amplifying human ACTB cDNA are shown in Table 39.

TABLE 39

| Primer name | Base sequence | SEQ ID NO. |
|---|---|---|
| hNANOG(+4835)-fwd | CTTCACTTCCCAGGTGCAA | 66 |
| hNANOG(+4835)-rev | AGGCTAGCCAACATGAGGAA | 67 |
| hACTB-Fwd | CCAACCGCGAGAAGATGA | 68 |
| hACTB-Rev | CCAGAGGCGTACAGGGATAG | 69 |

[0443] FIG. 36 is a graph showing the results of quantitative PCR in which an expression level of the NANOG gene was measured. The expression level of the NANOG gene was shown as a relative value with an expression level of the NANOG gene relative to the ACTB gene in “untreated” 1383D2 cells being 1.

[0444] In FIG. 36, the term “untreated” indicates the results of iPS cells that were not treated with IFN-γ and cultured under normal undifferentiated condition, the term “immediately after IFN” indicates immediately after being treated with IFN-γ for 48 hours, and the term “5 days after” indicates the results of cells 5 days after being treated with IFN-γ for 48 hours.

[0445] As a result, it was revealed that an expression level of NANOG, which has been widely used as a pluripotency marker, did not decrease even when iPS cells were treated with IFN-γ for 48 hours. This result indicates that pluripotency is maintained even when iPS cells are treated with IFN-γ.

### Experimental Example 29

### (Confirmation Test 2 of Pluripotency)

[0446] (1) 604B1 iPS cells, (2) a clone #3-11 which was produced in Experimental Example 11 and in which the A*01:01, B*37:01, and C*06:02 alleles of the 604B1 iPS cells had been disrupted, (3) same clone #3-12, (4) clone #1 in which a B2M gene of 604B1 iPS cells produced in Experimental Example 18 was had been disrupted, (5) 1383D2 iPS cells, (6) clone #1 in which a B2M gene of 1383D2 iPS cells produced in Experimental Example 17 had been disrupted were respectively cultured under undifferentiated conditions, and morphology of the respective cells was observed with a phase contrast microscope.

[0447] The culture under undifferentiated conditions was carried out using an AKO3N medium (StemFit, Ajinomo) as a medium and using a type “iMatrix-511” (Nippi) as a cell matrix.

[0448] FIGS. 37(a) to 37(f) are photographs of the cells of (1) to (5) respectively captured with a phase contrast microscope. A scale bar is 1 mm.

[0449] As a result, it was revealed that the HLA allele and the B2M allele were disrupted, and the IFN-γ-treated iPS cells also formed flat colonies as characteristics of undifferentiated pluripotent stem cells and proliferated. This result indicates that pluripotency is maintained even when iPS cells are treated with IFN-γ. This result also indicates that pluripotency is maintained even when the HLA allele or B2M allele of iPS cells has been disrupted.

### Experimental Example 30

### (Confirmation Test 3 of Pluripotency)

[0450] (1) 604B1 iPS cells, (2) a clone #3-11 which was produced in Experimental Example 11 and in which the A*01:01, B*37:01, and C*06:02 alleles of the 604B1 iPS cells had been disrupted, (3) same clone #3-12, (4) clone #1 in which a B2M gene of 604B1 iPS cells produced in Experimental Example 18 was had been disrupted, (5) 1383D2 iPS cells, (6) clone #1 in which a B2M gene of 1383D2 iPS cells produced in Experimental Example 17 had been disrupted were respectively cultured under conditions for inducing blood cell differentiation, and morphology of EB-derived blood-cell-like cells was observed with a phase contrast microscope.

[0451] Differentiation-induction of blood cell of iPS cells was performed as follows. First, undifferentiated iPS cells were seeded on an ultra-low adhesion culture plate (Corning), and EB (embryoid body) was formed for 2 days in an AKO3N medium containing Y-27633. Subsequently, the cells were cultured for 3 days in a StemPro-34 SFM medium (Thermo Fisher Scientific) containing human bFGF (Oriental Yeast Co., Ltd.), human VEGF (R & D Systems), Insulin-Transferrin-Selenium (ITS) (Thermo Fisher Scientific Co.), GlutaMax-I (Thermo Fisher Scientific), L-ascorbic acid 2-phosphate sesquimagnesium salt hydrate (Sigma), 1-Thioglycerol (MTG, NACALAI TESQUE, INC.), and human BMP4 (R & D Systems). Thereafter, human BMP4 was removed, human SCF was added, and the cells were cultured for 2 days. Subsequently, human Flt3-Ligand (Peprotech) and human TPO (Peprotech) were added and cultured. As a result, EB-derived blood-cell-like cells were generated.

[0452] FIGS. 38(a) to 38(f) are photographs of EB-derived blood-cell-like cells of (1) to (5) on the 22nd day of induction of differentiation, which were captured with a phase contrast microscope. A scale bar is 1 mm.

[0453] As a result, it was revealed that the HLA allele and the B2M allele were disrupted, and the iPS cells treated with IFN-γ could also be able to be differentiation-induced into blood cells. This result indicates that pluripotency is maintained even when iPS cells are treated with IFN-γ. This result also indicates that pluripotency is maintained even when the HLA allele or B2M allele of iPS cells has been disrupted.

### Experimental Example 31

### (Test 5 of T Cell Cytotoxicity)

[0454] (1) Cells (clone #1) which were produced in Experimental Example 17 and in which the B2M allele of the 1383D2 iPS cells having HLA haplotypes shown in Table 40 had been knocked out, and (2) 585A1 iPS cells having HLA haplotypes shown in Table 41, were stained with CFSE (Cayman Chemical Company), and were co-cultured for 7 days with peripheral blood mononuclear cells having HLA haplotypes shown in Table 42 (PBMC, type “LP_275,” CTL).

TABLE 40
HLA haplotype of 1383D2 iPS cell

| HLA-A | | HLA-B | | HLA-C | |
|---|---|---|---|---|---|
| A*02:07 | A*32:01 | B*15:02 | B*51:01 | C*08:01 | C*14:02 |

TABLE 41
HLA haplotype of 585A1 iPS cell

| HLA-A | | HLA-B | | HLA-C | |
|---|---|---|---|---|---|
| A*24:02 | A*24:02 | B*07:02 | B*52:01 | C*07:02 | C*12:02 |

TABLE 42
HLA haplotype of PBMC (LP_275, CTL)

| HLA-A | | HLA-B | | HLA-C | |
|---|---|---|---|---|---|
| A*02:06 | A*33:03 | B*40:01 | B*58:01 | C*03:02 | C*07:02 |

[0455] After co-culture, flow cytometric analysis was performed to examine fluorescence of CFSE. FIGS. 39(a) and 39(b) are graphs showing results of flow cytometry. In FIGS. 39(a) and 39(b), “1383D2 B2M-KO #1” indicates the results of PBMC co-cultured with the 1383D2 iPS cells (clone #1) in which B2M had been knocked out, and “585A1-WT” indicates the results of PBMC co-cultured with the 585A1 iPS cells.

[0456] As a result, as shown in FIG. 39(a), no CD8-positive and CSFE-negative T cells were present in the PBMC co-cultured with the 1383D2 iPS cells (clone #1) in which B2M had been knocked out. In addition, as shown in FIG. 39(b), the PBMC co-cultured with the 585A1 iPS cells contained 24.4% of CD8-positive T cells that had been activated and became CSFE-negative. Subsequently, from the PBMC co-cultured with the 585A1 iPS cells shown in FIG. 39(b), CD8-positive and CSFE-negative cells were sorted and recovered as effector CD8-positive T cells.

[0457] Subsequently, (1) 585A1 iPS cells, (2) clone #3-1 which was produced in Experimental Example 13 and in which A*24:02 allele, B*07:02 allele, B*52:01 allele, and C*12:02 allele of 585A1 iPS cells had been knocked out, (3) the same clone #3-3, and (4) cells (not subcloned bulk cells) produced in Experimental Example 46 to be described later and in which the B2M allele of 585A1 iPS cells had been knocked out, were respectively differentiation-induced into EB-derived blood-cell-like cells. The EB-derived blood-cell-like cells include blood cells.

[0458] Subsequently, the recovered effector CD8-positive T cells were added to the medium of each EB-derived blood-cell-like cell at various ratios to examine whether each EB-derived blood-cell-like cell was attacked. That is, target cells were EB-derived blood-cell-like cells that had been differentiation-induced from the cells of (1) to (4). A ratio of the number of CD8-positive T cells to be added as effectors was 0.625, 1.25, 2.5, 5, 10, and 20 with respect to EB-derived blood-cell-like cells 1.

[0459] FIG. 39(c) is a graph showing a ratio of each EB-derived blood-cell-like cell damaged and lysed. In FIG. 39(c), the symbol “**” indicates that there is a significant difference at P<0.01, “WT” indicates the results of EB-derived blood-cell-like cells differentiation-induced from the 585A1 iPS cells of (1), “C7#3-1” indicates the results of the EB-derived blood-cell-like cells differentiation-induced from the clone #3-1 of (2), “C7#3-3” indicates the results of the EB-derived blood-cell-like cells differentiation-induced from the clone #3-3 of (3), and “B2M⁻” indicates the results of the EB-derived blood-cell-like cells differentiation-induced from cells in which the B2M allele of the 585A1 iPS cells of (4) had been knocked out.

[0460] As a result, it was revealed that the EB-derived blood-cell-like cells differentiation-induced from the 585A1 iPS cells had a higher degree of injury when a proportion of CD8-positive T cells as effectors was increased.

[0461] In contrast, it was clarified that EB-derived blood-cell-like cells differentiation-induced from the clones #3-1 and #3-3 in which the A*24:02 allele, B*07:02 allele, B*52:01 allele, and C*12:02 allele of the 585A1 iPS cells were knocked out; and the EB-derived blood-cell-like cells differentiation-induced from cells in which the B2M allele of the 585A1 iPS cells were knocked out, were not damaged even when a proportion of CD8-positive T cells as effectors was increased.

[0462] These results further support that it is possible to reduce a rejection reaction in a case where cells were differentiation-induced and allogeneically transplanted by disrupting the HLA allele of iPS cells.

### Experimental Example 32

### (Test 6 of T Cell Cytotoxicity)

[0463] (1) Cells (clone #1) which were produced in Experimental Example 17 and in which the B2M allele of the 1383D2 iPS cells having HLA haplotypes shown in Table 43 had been knocked out, and (2) 585A1 iPS cells having HLA haplotypes shown in Table 44, were co-cultured for 7 days with cells obtained by staining, with CFSE (Cayman Chemical Company), peripheral blood mononuclear cells having HLA haplotypes shown in Table 45 (PBMC, type “LP_329,” CTL).

TABLE 43
HLA haplotype of 1383D2 iPS cell

| HLA-A | | HLA-B | | HLA-C | |
|---|---|---|---|---|---|
| A*02:07 | A*32:01 | B*15:02 | B*51:01 | C*08:01 | C*14:02 |

TABLE 44
HLA haplotype of 585A1 iPS cell

| HLA-A | | HLA-B | | HLA-C | |
|---|---|---|---|---|---|
| A*24:02 | A*24:02 | B*07:02 | B*52:01 | C*07:02 | C*12:02 |

TABLE 45
HLA haplotype of PBMC (LP_329, CTL)

| HLA-A | | HLA-B | | HLA-C | |
|---|---|---|---|---|---|
| A*29:02 | A*68:01 | B*39:06 | B*40:02 | C*03:05 | C*07:02 |

[0464] After co-culture, flow cytometric analysis was performed to examine fluorescence of CFSE. FIGS. 40(a) and 40(b) are graphs showing results of flow cytometry. In FIGS. 40(a) and 40(b), “1383D2 B2M-KO #1” indicates the results of PBMC co-cultured with the 1383D2 iPS cells (clone #1) in which B2M had been knocked out, and “585A1-WT” indicates the results of PBMC co-cultured with the 585A1 iPS cells.

[0465] As a result, as shown in FIG. 40(a), no CD8-positive and CSFE-negative T cells were present in the PBMC co-cultured with the 1383D2 iPS cells (clone #1) in which B2M had been knocked out. In addition, as shown in FIG. 40(b), the PBMC co-cultured with the 585A1 iPS cells contained 11.7% of CD8-positive T cells that had been activated and became CSFE-negative. Subsequently, from the PBMC co-cultured with the 585A1 iPS cells shown in FIG. 40(b), CD8-positive and CSFE-negative cells were sorted and recovered as effector CD8-positive T cells.

[0466] Subsequently, (1) 585A1 iPS cells, (2) clone #3-1 which was produced in Experimental Example 13 and in which A*24:02 allele, B*07:02 allele, B*52:01 allele, and C*12:02 allele of 585A1 iPS cells had been knocked out, (3) the same clone #3-3, and (4) cells (not subcloned bulk cells) produced in Experimental Example 46 to be described later and in which the B2M allele of 585A1 iPS cells had been knocked out, were respectively differentiation-induced into EB-derived blood-cell-like cells. The EB-derived blood-cell-like cells include blood cells.

[0467] Subsequently, the recovered effector CD8-positive T cells were added to the medium of each EB-derived blood-cell-like cell at various ratios to examine whether each EB-derived blood-cell-like cell was attacked. That is, target cells were EB-derived blood-cell-like cells that had been differentiation-induced from the cells of (1) to (4). A ratio of the number of CD8-positive T cells to be added as effectors was 0.625, 1.25, 2.5, 5, 10, and 20 with respect to EB-derived blood-cell-like cells 1.

[0468] FIG. 40(c) is a graph showing a ratio of each EB-derived blood-cell-like cell damaged and lysed. In FIG. 40(c), the symbol “*” indicates that there is a significant difference at P<0.01, “WT” indicates the results of EB-derived blood-cell-like cells differentiation-induced from the 585A1 iPS cells of (1), “C7#3-1” indicates the results of the EB-derived blood-cell-like cells differentiation-induced from the clone #3-1 of (2), “C7#3-3” indicates the results of the EB-derived blood-cell-like cells differentiation-induced from the clone #3-3 of (3), and “B2M⁻” indicates the results of the EB-derived blood-cell-like cells differentiation-induced from cells in which the B2M allele of the 585A1 iPS cells of (4) had been knocked out.

[0469] As a result, it was revealed that the EB-derived blood-cell-like cells differentiation-induced from the 585A1 iPS cells had a higher degree of injury when a proportion of CD8-positive T cells as effectors was increased.

[0470] In contrast, it was clarified that EB-derived blood-cell-like cells differentiation-induced from the clones #3-1 and #3-3 in which the A*24:02 allele, B*07:02 allele, B*52:01 allele, and C*12:02 allele of the 585A1 iPS cells were knocked out; and the EB-derived blood-cell-like cells differentiation-induced from cells in which the B2M allele of the 1383D2 iPS cells were knocked out, were not damaged even when a proportion of CD8-positive T cells as effectors was increased.

[0471] These results further support that it is possible to reduce a rejection reaction in a case where cells were differentiation-induced and allogeneically transplanted by disrupting the HLA allele of iPS cells.

### Experimental Example 33

### (Cell Transplantation Experiment 1)

[0472] (1) 585A1 iPS cells, and (2) the clone #3-1 which was produced in Experimental Example 13 and in which the A*24:02 allele, B*07:02 allele, B*52:01 allele, and C*12:02 allele of the 585A1 iPS cells were knocked out, were respectively differentiation-induced into EB-derived blood-cell-like cells. Subsequently, the respective EB-derived blood-cell-like cells were labeled with luciferase.

[0473] Subsequently, one hour before the start of the experiment, each of the cell was transplanted into immunodeficient mice (NOD.Cg-Rag1^{tm1Mom}I12rg^{tm1Wj1}/SzJ (NRG), The Jackson Laboratory) by intraperitoneal administration. Subsequently, at the start of the experiment, effector CD8-positive T cells which were prepared in the same manner as in Experimental Example 32 and were derived from peripheral blood mononuclear cells (PBMC, type “LP_329,” CTL) or a medium (control) were further intraperitoneally administered.

[0474] Then, at the time of cell transplantation (before T cell injection), 5 hours, 1 day, 3 days, and 7 days after the start of the experiment, luciferin, which is a substrate of luciferase, was administered to each mouse. Using an IVIS imaging system (trade name “IVIS Spectrum,” SPI), fluorescence of the EB-derived blood-cell-like cells labeled with luciferase was captured, and a survival rate of the transplanted cells was measured.

[0475] FIG. 41(a) is a diagram illustrating an experimental schedule. Furthermore, FIG. 41(b) shows a photograph showing results of capturing fluorescence of EB-derived blood-cell-like cells in each mouse. Furthermore, FIG. 41(c) is graph of a relative survival curve showing the results of calculating a survival rate of each EB-derived blood-cell-like cell in a case where the effector CD8-positive T cells were administered to the mouse, with a fluorescence intensity before T cell injection being 100%.

[0476] In FIGS. 41(b) and 41(c), “WT” indicates the results of EB-derived blood-cell-like cells differentiation-induced from the 585A1 iPS cells of (1), “C7 #3-1” indicates the results of EB-derived blood-cell-like cells differentiation-induced from the clone #3-1 of (2), “Mock” indicates the results of administration of the medium as a control, and “T cell” indicates the results of administration of the effector CD8-positive T cells derived from peripheral blood mononuclear cells (PBMC, type “LP_329,” CTL).

[0477] As a result, as shown in FIG. 41(c), it was confirmed that the EB-derived blood-cell-like cells differentiation-induced from 585A1 iPS cells had a reduced survival rate after administration of the effector CD8-positive T cells. On the other hand, it became clear that the EB-derived blood-cell-like cells differentiation-induced from the clone #3-1 in which the A*24:02 allele, B*07:02 allele, B*52:01 allele, and C*12:02 allele of 585A1 iPS cells were knocked out maintained a high survival rate even after the administration of the effector CD8-positive T cells.

[0478] These results further support that it is possible to reduce a rejection reaction in a case where cells were differentiation-induced and allogeneically transplanted by disrupting the HLA allele of iPS cells.

### Experimental Example 34

### (Reactivity Test 2 of NK Cells)

[0479] (1) 585A1 iPS cells, (2) clone #3-1 which was produced in Experimental Example 13 and in which A*24:02 allele, B*07:02 allele, B*52:01 allele, and C*12:02 allele of 585A1 iPS cells had been knocked out, and (3) cells (not subcloned bulk cells) produced in Experimental Example 46 to be described later and in which the B2M allele of 585A1 iPS cells had been knocked out, were prepared. Table 46 shows HLA haplotypes of 585A1 iPS cells, and Table 47 shows HLA haplotypes of 1383D2 iPS cells.

TABLE 46
HLA haplotype of 585A1 iPS cell

| HLA-A | | HLA-B | | HLA-C | |
|---|---|---|---|---|---|
| A*24:02 | A*24:02 | B*07:02 | B*52:01 | C*07:02 | C*12:02 |

TABLE 47
HLA haplotype of 1383D2 iPS cell

| HLA-A | | HLA-B | | HLA-C | |
|---|---|---|---|---|---|
| A*02:07 | A*32:01 | B*15:02 | B*51:01 | C*08:01 | C*14:02 |

[0480] In addition, CD56-positive cells (NK cells) were recovered from PBMC having an HLA haplotype shown in Table 48 (type “LP_275,” CTL) by sorting. Subsequently, the recovered NK cells were co-cultured with each of cells of (1) to (3) in the presence of the anti-CD107a antibody. As a result, when the NK cells were activated, they became CD107a-positive. After co-culture, flow cytometric analysis was performed to measure a percentage of activated NK cells.

TABLE 48
HLA haplotype of PBMC (LP_275, CTL)

| HLA-A | | HLA-B | | HLA-C | |
|---|---|---|---|---|---|
| A*02:06 | A*33:03 | B*40:01 | B*58:01 | C*03:02 | C*07:02 |

[0481] FIG. 42(a) is a graph showing results of flow cytometric analysis. In FIG. 42(a), the symbol “**” indicates that there is a significant difference at P<0.01, “WT” indicates the results of the 585A1 iPS cells of (1), “C7#3-1” indicates the results of the clone #3-1 of (2), and “B2M⁻” indicates the results of the cells in which the B2M allele of the 585A1 iPS cells of (3) had been knocked out.

[0482] As a result, it was revealed that the 585A1 iPS cells and the clone #3-1 were able to significantly inhibit activation of NK cells, as compared to cells in which the B2M allele was knocked out. Then, NK cells activated with cells in which the B2M allele was knocked out were sorted and recovered.

[0483] Subsequently, for (4) K562 cells known not to express HLA antigen; (5) cells which were produced in Experimental Example 46 to be described later and in which B2M allele of 585A1 iPS cells was knocked out (not subcloned bulk cells); (6) cells which were produced in Experimental Example 47 to be described later and in which the HLA-A allele, HLA-B allele, and HLA-C allele of 585A1 iPS cells were knocked out (where clones #3-5, HLA-E, HLA-F, and HLA-G alleles remained); (7) the clone #3-1 which was produced in Experimental Example 13 and in which the A*24:02 allele, B*07:02 allele, B*52:01 allele, and C*12:02 allele of 585A1 iPS cells were knocked out; (8) the same clone #3-3; (9) cells which were produced in Experimental Example 13 and in which the HLA-A and HLA-B alleles of the 585A1 iPS cells were knocked out (where clone #3, HLA-C, HLA-E, HLA-F, and HLA-G alleles remained); and (10) 585A1 iPS cells, activated NK cells were added to each of cells at various ratios, and a ⁵¹Cr release assay was performed.

[0484] That is, the above-mentioned activated NK cells were used as effector cells, and the above-mentioned cells of (4) to (10) were used as target cells. A percentage of the number of NK cells to be added was 0.33, 1, and 3 with respect to the target cells 1.

[0485] FIG. 42(b) is a graph showing a ratio of the cells of (4) to (10) described above that were damaged and lysed. In FIG. 42(b), the symbol “*” indicates that there is a significant difference at P<0.05, the symbol “**” indicates that there is a significant difference at P<0.01, “K562” indicates the results of the K562 cells of (4), “B2M⁻” indicates the results of cells in which the B2M allele of the 585A1 iPS cell of (5) was knocked out, “A⁻B⁻C⁻#5” indicates the results of the cells (clone #3-5) in which the HLA-A allele, HLA-B allele, and HLA-C allele of (6) were knocked out, “C7#3-1” indicates the results of the clone #3-1 of (7), “C7#3-3” indicates the results of the clone #3-3 of (8), “A⁻B⁻#3” indicates the results of the cells (clone #3) in which the HLA-A allele and the HLA-B allele of (9) were knocked out, and “585A1-WT” indicates the results of the 585A1 iPS cells of (10).

[0486] As a result, it was revealed that the cells in which the HLA-C allele remained could significantly avoided attack by NK cells, as compared to cells in which B2M was knocked out, and cells in which the HLA-A allele, HLA-B allele, and HLA-C alleles were knocked out.

### Experimental Example 35

### (Reactivity Test 3 of NK Cells)

[0487] (1) 585A1 iPS cells, (2) clone #3-1 which was produced in Experimental Example 13 and in which A*24:02 allele, B*07:02 allele, B*52:01 allele, and C*12:02 allele of 585A1 iPS cells had been knocked out, and (3) cells (not subcloned bulk cells) produced in Experimental Example 46 to be described later and in which the B2M allele of 585A1 iPS cells had been knocked out, were prepared. Table 49 shows HLA haplotypes of 585A1 iPS cells, and Table 50 shows HLA haplotypes of 1383D2 iPS cells.

TABLE 49
HLA haplotype of 585A1 iPS cell

| HLA-A | | HLA-B | | HLA-C | |
|---|---|---|---|---|---|
| A*24:02 | A*24:02 | B*07:02 | B*52:01 | C*07:02 | C*12:02 |

TABLE 50
HLA haplotype of 1383D2 iPS cell

| HLA-A | | HLA-B | | HLA-C | |
|---|---|---|---|---|---|
| A*02:07 | A*32:01 | B*15:02 | B*51:01 | C*08:01 | C*14:02 |

[0488] In addition, CD3-negative and CD56-positive cells (NK cells) were recovered from PBMC having an HLA haplotype shown in Table 51 (type “LP_329,” CTL) by sorting. Subsequently, the recovered NK cells were co-cultured with each of cells of (1) to (3) in the presence of the anti-CD107a antibody. As a result, when the NK cells were activated, they became CD107a-positive. After co-culture, flow cytometric analysis was performed to measure a percentage of activated NK cells.

TABLE 51
HLA haplotype of PBMC (LP_329, CTL)

| HLA-A | | HLA-B | | HLA-C | |
|---|---|---|---|---|---|
| A*29:02 | A*68:01 | B*39:06 | B*40:02 | C*03:05 | C*07:02 |

[0489] FIG. 43(a) is a graph showing results of flow cytometric analysis. In FIG. 43(a), the symbol “**” indicates that there is a significant difference at P<0.01, “WT” indicates the results of the 585A1 iPS cells of (1), “C7#3-1” indicates the results of the clone #3-1 of (2), and “B2M⁻” indicates the results of the cells in which the B2M allele of the 585A1 iPS cells of (3) had been knocked out.

[0490] As a result, it was revealed that the 585A1 iPS cells and the clone #3-1 were able to significantly inhibit activation of NK cells, as compared to cells in which the B2M allele was knocked out. Then, NK cells activated with cells in which the B2M allele was knocked out were sorted and recovered.

[0491] Subsequently, for (4) K562 cells known not to express HLA antigen; (5) cells which were produced in Experimental Example 46 to be described later and in which B2M allele of 585A1 iPS cells was knocked out (not subcloned bulk cells); (6) cells which were produced in Experimental Example 47 to be described later and in which the HLA-A allele, HLA-B allele, and HLA-C allele of 585A1 iPS cells were knocked out (where clones #3-5, HLA-E, HLA-F, and HLA-G alleles remained); (7) the clone #3-1 which was produced in Experimental Example 13 and in which the A*24:02 allele, B*07:02 allele, B*52:01 allele, and C*12:02 allele of 585A1 iPS cells were knocked out; (8) the same clone #3-3; (9) cells which were produced in Experimental Example 13 and in which the HLA-A and HLA-B alleles of the 585A1 iPS cells were knocked out (where clone #3, HLA-C, HLA-E, HLA-F, and HLA-G alleles remained); and (10) 585A1 iPS cells, activated NK cells were added to each of cells at various ratios, and a ⁵¹Cr release assay was performed.

[0492] That is, the above-mentioned activated NK cells were used as effector cells, and the above-mentioned cells of (4) to (10) were used as target cells. A percentage of the number of NK cells to be added was 0.33, 1, and 3 with respect to the target cells 1.

[0493] FIG. 43(b) is a graph showing a ratio of the cells of (4) to (10) described above that were damaged and lysed. In FIG. 43(b), the symbol “**” indicates that there is a significant difference at P<0.01, “K562” indicates the results of the K562 cells of (4), “B2M⁻” indicates the results of cells in which the B2M allele of the 585A1 iPS cell of (5) was knocked out, “A⁻B⁻C⁻#5” indicates the results of the cells (clone #5) in which the HLA-A allele, HLA-B allele, and HLA-C allele of (6) were knocked out, “C7#3-1” indicates the results of the clone #3-1 of (7), “C7#3-3” indicates the results of the clone #3-3 of (8), “A⁻B⁻#3” indicates the results of the cells (clone #3) in which the HLA-A allele and the HLA-B allele of (9) were knocked out, and “585A1-WT” indicates the results of the 585A1 iPS cells of (10).

[0494] As a result, it was revealed that the cells in which the HLA-C allele remained could significantly avoided attack by NK cells, as compared to cells in which B2M was knocked out, and cells in which the HLA-A allele, HLA-B allele, and HLA-C alleles were knocked out.

### Experimental Example 36

### (Reactivity Test 4 of NK Cells)

[0495] (1) 585A1 iPS cells, (2) clone #3-1 which was produced in Experimental Example 13 and in which A*24:02 allele, B*07:02 allele, B*52:01 allele, and C*12:02 allele of 585A1 iPS cells had been knocked out, (3) cells (not subcloned bulk cells) produced in Experimental Example 46 to be described later and in which the B2M allele of 585A1 iPS cells had been knocked out, and (4) K562 cells known not to express HLA antigen, were prepared. Table 52 shows HLA haplotypes of 585A1 iPS cells, and Table 53 shows HLA haplotypes of 1383D2 iPS cells.

TABLE 52
HLA haplotype of 585A1 iPS cell

| HLA-A | | HLA-B | | HLA-C | |
|---|---|---|---|---|---|
| A*24:02 | A*24:02 | B*07:02 | B*52:01 | C*07:02 | C*12:02 |

TABLE 53
HLA haplotype of 1383D2 iPS cell

| HLA-A | | HLA-B | | HLA-C | |
|---|---|---|---|---|---|
| A*02:07 | A*32:01 | B*15:02 | B*51:01 | C*08:01 | C*14:02 |

[0496] In addition, CD3-negative and CD56-positive cells (NK cells) were respectively recovered from PBMC having HLA haplotypes shown in Table 54 (type “LP_118,” CTL) and PBMC having HLA haplotypes shown in Table 55 (type “LP_266,” CTL) by sorting. Subsequently, the recovered NK cells were co-cultured with each of cells of (1) to (4) in the presence of the anti-CD107a antibody. As a result, when the NK cells were activated, they became CD107a-positive. After co-culture, flow cytometric analysis was performed to measure a percentage of activated NK cells.

TABLE 54
HLA haplotype of PBMC (LP_118, CTL)

| HLA-A | | HLA-B | | HLA-C | |
|---|---|---|---|---|---|
| A*03:01 | A*24:02 | B*07:02 | B*35:01 | C*07:02 | C*07:02 |

TABLE 55
HLA haplotype of PBMC (LP_266, CTL)

| HLA-A | | HLA-B | | HLA-C | |
|---|---|---|---|---|---|
| A*03:01 | A*24:02 | B*07:02 | B*40:02 | C*03:05 | C*07:02 |

[0497] FIG. 44(a) and FIG. 44(b) are graphs showing results of flow cytometric analysis. FIG. 44(a) shows the results of NK cells derived from PBMC having HLA haplotypes shown in Table 54 (type “LP_118,” CTL), and FIG. 44(b) shows the results of NK cells derived from PBMC having HLA haplotypes shown in Table 55 (type “LP_266,” CTL). In FIGS. 44(a) and 44(b), the symbol “**” indicates that there is a significant difference at P<0.01, “WT” indicates the results of the 585A1 iPS cells of (1), “C7#3-1” indicates the results of the clone #3-1 of (2), “B2M⁻” indicates the results of the cells in which the B2M allele of the 585A1 iPS cells of (3) had been knocked out, and “K562” indicates the results of the K562 cells of (4).

[0498] As a result, it was revealed that the 585A1 iPS cells and the clone #3-1 were able to significantly inhibit activation of NK cells, as compared to cells in which the B2M allele was knocked out.

### Experimental Example 37

### (Cell Transplantation Experiment 2)

[0499] (1) Cells in which a B2M gene of 585A1 iPS cell was knocked out, and (2) the clone #3-1 which was produced in Experimental Example 13 and in which the A*24:02 allele, B*07:02 allele, B*52:01 allele, and C*12:02 allele of the 585A1 iPS cells were knocked out, were respectively differentiation-induced into EB-derived blood-cell-like cells. Subsequently, the respective EB-derived blood-cell-like cells were labeled with luciferase.

[0500] Subsequently, one hour before the start of the experiment, each of the cell was transplanted into immunodeficient mice (NOD.Cg-Rag1^{tm1Mom}I12rg^{tm1Wj1}/SzJ (NRG), The Jackson Laboratory) by intraperitoneal administration. Subsequently, at the start of the experiment, activated NK cells which were prepared in the same manner as in Experimental Examples 34 and 35 and were derived from peripheral blood mononuclear cells (PBMC, type “LP_329,” CTL) or a medium (control) were further intraperitoneally administered. Table 56 shows HLA haplotypes of PBMC (type “LP_329,” CTL).

TABLE 56
HLA haplotype of PBMC (LP_329, CTL)

| HLA-A | | HLA-B | | HLA-C | |
|---|---|---|---|---|---|
| A*29:02 | A*68:01 | B*39:06 | B*40:02 | C*03:05 | C*07:02 |

[0501] Then, at the time of cell transplantation (before NK cells injection), 5 hours, 1 day, 3 days, 5 days, and 7 days after the start of the experiment, luciferin, which is a substrate of luciferase, was administered to each mouse. Using an IVIS imaging system (trade name “IVIS Spectrum,” SPI), fluorescence of the EB-derived blood-cell-like cells labeled with luciferase was captured, and a survival rate of the transplanted cells was measured.

[0502] FIG. 45(a) is a diagram illustrating an experimental schedule. Furthermore, FIG. 45(b) shows a photograph showing results of capturing fluorescence of EB-derived blood-cell-like cells in each mouse. Furthermore, FIG. 45(c) is graph showing the results of calculating a survival rate of each EB-derived blood-cell-like cell in a case where the NK cells were administered to the mouse, with a fluorescence intensity before NK cell injection being 100%, and furthermore, calculating a relative survival rate at each measurement time by Formula (F1). In FIG. 45(c), a unit of a vertical axis is (%).

Relative survival rate (%)=survival rate (%) of NK cell administration group/survival rate (%) of control group×100 (F1)

[0503] In FIGS. 45(b) and 45(c), “B2M⁻” indicates the results of EB-derived blood-cell-like cells differentiation-induced from cells in which a B2M gene of the 585A1 iPS cells of (1) was knocked out, “C7 #3-1” indicates the results of EB-derived blood-cell-like cells differentiation-induced from the clone #3-1 of (2), “Mock” indicates the results of administration of the medium as a control, and “NK cell” indicates the results of administration of the activated NK cells derived from peripheral blood mononuclear cells (PBMC, type “LP_329,” CTL).

[0504] As a result, as shown in FIG. 45(c), it was confirmed that the EB-derived blood-cell-like cells differentiation-induced from the cells in which a B2M gene was knocked out had a reduced survival rate after administration of the NK cells. On the other hand, it was recognized that the EB-derived blood-cell-like cells differentiation-induced from the clone #3-1 tended to maintain a higher survival rate even after administration of activated NK cells.

[0505] These results further support that by partially leaving the HLA allele, it is possible to reduce the attack by NK cells in the case of allogeneic transplantation.

### Experimental Example 38

### (Cytotoxicity Test Using T Cells and NK Cells)

[0506] (1) 585A1 iPS cells, (2) clone #3-1 which was produced in Experimental Example 13 and in which A*24:02 allele, B*07:02 allele, B*52:01 allele, and C*12:02 allele of 585A1 iPS cells had been knocked out, and (3) cells (not subcloned bulk cells) produced in Experimental Example 46 to be described later and in which the B2M allele of 585A1 iPS cells had been knocked out, were respectively differentiation-induced into EB-derived blood-cell-like cells.

[0507] Subsequently, in a medium for each of the EB-derived blood-cell-like cells and at various proportions, effector CD8-positive T cells recovered by sorting from peripheral blood mononuclear cells (PBMC, type “LP_275,” CTL) were added in the same manner as in Experimental Example 31, and activated NK cells recovered by sorting from PBMC (type “LP_275,” CTL) were added in the same manner as in Experimental Example 34, and a ⁵¹Cr release assay was performed.

[0508] That is, target cells were EB-derived blood-cell-like cells that had been differentiation-induced from the cells of (1) to (3), and the effector cells were the above-mentioned CD8-positive T cells and activated NK cells. A ratio of the number of CD8-positive T cells to be added as effectors was 1, 3, and 9 with respect to EB-derived blood-cell-like cells 1. In addition, a ratio of the number of activated NK cells to be added was 0.33, 1, and 3 with respect to EB-derived blood-cell-like cells 1.

[0509] FIG. 46 is a graph showing a ratio of each EB-derived blood-cell-like cell damaged and lysed. In FIG. 46, the symbol “*” indicates that there is a significant difference at P<0.05, the symbol “**” indicates that there is a significant difference at P<0.01, “WT” indicates the results of EB-derived blood-cell-like cells differentiation-induced from the 585A1 iPS cells of (1), “C7#3-1” indicates the results of the EB-derived blood-cell-like cells differentiation-induced from the clone #3-1 of (2), and “B2M⁻” indicates the results of the EB-derived blood-cell-like cells differentiation-induced from cells in which the B2M allele of the 585A1 iPS cells of (3) had been knocked out.

[0510] As a result, it was confirmed that when EB-derived blood-cell-like cells were mixed alone with the effector CD8-positive T cells, only EB-derived blood-cell-like cells that were differentiation-induced from 585A1 iPS cells were damaged.

[0511] In addition, it was confirmed that when each of the EB-derived blood-cell-like cells was mixed with the activated NK cell alone, only the EB-derived blood-cell-like cell differentiation-induced from the cells in which the B2M allele was knocked out, was damaged.

[0512] In addition, it was revealed that when each of the effector CD8-positive T cells and the activated NK cells are mixed with each of the EB-derived blood-cell-like cells, both EB-derived blood-cell-like cells differentiation-induced from 585A1 iPS cells and EB-derived blood-cell-like cells differentiation-induced from cells in which the B2M allele was knocked out were damaged, but a degree of damage was significantly suppressed in the EB-derived blood-cell-like cells that were differentiation-induced from C7#3-1 cells.

[0513] These results indicate that damage caused by both the effector CD8-positive T cells and the activated NK cells can be reduced by disrupting an HLA allele present in donor cells but not present in recipient cells and by leaving HLA alleles matching in the donor cells and the recipient cells.

### Experimental Example 39

### (Production of CIITA Gene Knockout iPS Cell)

[0514] A CIITA gene is a gene encoding a Class II Major Histocompatibility Complex Transactivator protein. As described above, expression of the CIITA gene is known to be essential for expression of class II HLA protein.

[0515] A CIITA gene of the clone #3-1 (hereinafter, may be referred to as “585A1-C7 residual cells”), which was produced in Experimental Example 13 and in which the A*24:02 allele, B*07:02 allele, B*52:01 allele, and C*12:02 allele of 585A1 iPS cells were knocked out, was knocked out.

[0516] FIG. 47(a) is a table showing 585A1-C7 residual cells and an HLA haplotype of the 585A1-C7 residual cells in which a CIITA gene was knocked out. By knocking out the CIITA gene, class II HLA proteins such as HLA-DP, HLA-DQ, and HLA-DR can be deleted.

[0517] Specifically, the 585A1-C7 residual cells were transfected with a purified Cas9 protein together with CIITA-ex3g5 that is an sgRNA that cleaves a CIITA allele (where a target base sequence is set forth in SEQ ID NO: 8017), and subclones of 28 strains were obtained. A commercially available kit (trade name “4D-Nucleofector,” model “V4XP-4032,” Lonza) was used for transfection.

[0518] Then, a base sequence of the CIITA allele of the genome of each subclone was analyzed. FIG. 47(b) is a table showing a base mutation pattern of each subclone. In FIG. 47(b), “Clone ID” indicates the subclone name, “WT” indicates that it was a wild-type base sequence, “−” had a deletion mutation, and “+” indicates that it had an insertion mutation.

[0519] As a result, as shown in FIG. 47(b), it was confirmed that a deletion mutation or an insertion mutation was introduced into at least one of CIITA alleles in 15 strains among subclones of 28 strains. In FIG. 47(c), a base sequence of clone #3-1-3 is shown as a representative example.

### Experimental Example 40

### (Test of CD4-Positive T Cell Activation)

[0520] CD4-positive T cells were recovered from peripheral blood mononuclear cells (PBMC) derived from healthy volunteer #21 by sorting, and were stained with CFSE (Cayman Chemical Co.).

[0521] Subsequently, the above CD4-positive T cells were mixed and co-cultured for 1 week with (1) 585A1 iPS cells, (2) clone #3-1 which was produced in Experimental Example 13 and in which A*24:02 allele, B*07:02 allele, B*52:01 allele, and C*12:02 allele of 585A1 iPS cells had been knocked out (hereinafter, also referred to as “585A1-C7 residual cells”), and (3) the cells which were produced in Experimental Example 39 and in which a CIITA gene of 585A1-C7 residual cells was knocked out (clone #3-1-3). In addition, for comparison, a group in which the above-mentioned CD4-positive T cells of (4) were cultured alone for 1 week was prepared.

[0522] After co-culture, flow cytometric analysis was performed to examine fluorescence of CFSE. FIGS. 48(a) to 48(d) are graphs showing results of flow cytometry. In FIGS. 48(a) to 48(d), “Mock” indicates the results of culturing only the CD4-positive T cells of (4), “585A1-WT” indicates the results of 585A1 iPS cells of (1), “585A1-C7 #3-1” indicates the results of the 585A1-C7 residual cells of (2), and “585A1-C7+CIITA⁻#3-1-3” indicates the results of the cells (clone #3-1-3) in which the CIITA gene of the 585A1-C7 residual cells of (3) was knocked out.

[0523] As a result, as shown in FIG. 48(a), it was revealed that the CD4-positive T cells were not activated even when only the CD4-positive T cells were cultured alone.

[0524] Furthermore, as shown in FIG. 48(b), it became clear that when the CD4-positive T cells derived from healthy volunteer #21 and the 585A1 iPS cells were co-cultured, 45.6% of the CD4-positive T cells were activated and became CFSE-negative.

[0525] Furthermore, as shown in FIG. 48(c), it became clear that when the CD4-positive T cells derived from healthy volunteer #21 and the 585A1-C7 residual cells were co-cultured, 49.2% of the CD4-positive T cells were activated and became CFSE-negative.

[0526] Furthermore, as shown in FIG. 48(d), it became clear that even when the CD4-positive T cells derived from healthy volunteer #21 and the cells (clone #3-1-3) in which the CIITA gene of 585A1-C7 residual cells was knocked out were co-cultured, the CD4-positive T cells were not activated.

### Experimental Example 41

### (Test of Activation of CD4-Positive T Cells, CD8-Positive T Cells, and NK Cells)

[0527] Peripheral blood mononuclear cells (PBMC, type “LP_329,” CTL) were stained with CFSE (Cayman Chemical). Table 57 shows HLA haplotypes of PBMC (type “LP_329,” CTL).

TABLE 57
HLA haplotype of PBMC (LP_329, CTL)

| HLA-A | | HLA-B | | HLA-C | |
|---|---|---|---|---|---|
| A*29:02 | A*68:01 | B*39:06 | B*40:02 | C*03:05 | C*07:02 |

[0528] Subsequently, the above PBMC was mixed and co-cultured for 1 week with (1) 585A1 iPS cells, (2) clone #3-1 which was produced in Experimental Example 13 and in which A*24:02 allele, B*07:02 allele, B*52:01 allele, and C*12:02 allele of 585A1 iPS cells had been knocked out (hereinafter, also referred to as “585A1-C7 residual cells”), (3) the cells which were produced in Experimental Example 39 and in which a CIITA gene of 585A1-C7 residual cells was knocked out (clone #3-1-3), (4) EB-derived blood-cell-like cells differentiated from each cell of the clone #3-1-6, and (5) K562 cells known not to express HLA antigen. In addition, for comparison, a group in which the above-mentioned PBMC of (6) were cultured alone for 1 week was prepared.

[0529] After co-culture, flow cytometric analysis was performed to examine fluorescence of CFSE. FIGS. 49(a) to 49(c) are graphs showing results of flow cytometry. In FIGS. 49(a) to 49(c), “Mock” indicates the results of culturing only PBMC of (6) alone; “585A1-WT” indicates the results of EB-derived blood-cell-like cells differentiation-induced from the 585A1 iPS cells of (1); “585A1-C7 #3-1” indicates the results of EB-derived blood-cell-like cells differentiation-induced from the 585A1-C7 residual cells of (2); “585A1-C7+CIITA⁻#3-1-3” indicates the results of EB-derived blood-cell-like cells differentiation-induced from the cells (clone #3-1-3) in which the CllTA gene of the 585A1-C7 residual cells of (3) was knocked out; “585A1-C7+CIITA⁻ #3-1-6” indicates the results of EB-derived blood-cell-like cells differentiation-induced from the cells (clone #3-1-6) in which the CIITA gene of the 585A1-C7 residual cells of (4) was knocked out; and “K562” indicates the results of the K562 cells of (5).

[0530] As a result, as shown in FIG. 49(a), it became clear that the CD8-positive T cells reacted with the EB-derived blood-cell-like cells differentiation-induced from the 585A1 iPS cells, and 51.0% of the CD8-positive T cells were activated and became CFSE-negative. On the other hand, it was revealed that even when the CD8-positive T cells were co-cultured with cells other than the EB-derived blood-cell-like cells differentiation-induced from 585A1 iPS cells, only 2% or less of the CD8-positive T cells were activated.

[0531] Furthermore, as shown in FIG. 49(b), it became clear that the CD4-positive T cells reacted with the EB-derived blood-cell-like cells differentiation-induced from 585A1 iPS cells and the EB-derived blood-cell-like cells differentiation-induced from 585A1-C7 residual cells, and for each of the cases, 49.2% and 26.7% of the CD4-positive T cells were activated and became CFSE-negative. On the other hand, it was revealed that even when the CD4-positive T cells were co-cultured with other cells, only 2% or less of the CD4-positive T cells were activated.

[0532] Furthermore, as shown in FIG. 49(c), it was revealed that the NK cells reacted with the K562 cells, and 79.2% of the NK cells were activated and became CFSE-negative. On the other hand, it was revealed that even when the NK cells were co-cultured with other cells, only 7% or less of the NK cells were activated.

### Experimental Example 42

[0533] (Production of iPS Cells with Residual HLA-C7 and Deficient CIITA)

[0534] An HLA-A allele, an HLA-B allele, and a CIITA allele were knocked out from iPS stock cells (Ff-Xt-28s05 iPS cells) which has the third most frequent HLA allele among Japanese homozygously. Knockout was performed by one-stage genome editing and two-stage genome editing. Table 58 shows HLA haplotypes of Ff-Xt-28s05 iPS cells.

TABLE 58
HLA haplotype of Ff-Xt-28s05 iPS cells

| HLA-A | | HLA-B | | HLA-C | |
|---|---|---|---|---|---|
| A*24:02 | A*24:02 | B*07:02 | B*07:02 | C*07:02 | C*07:02 |

[0535] FIGS. 50(a) to 50(c) are diagrams illustrating a procedure of the present experimental example. FIG. 50(a) is a diagram illustrating a procedure in which the HLA-A allele, the HLA-B allele, and the CIITA allele were knocked out in one stage. Furthermore, FIGS. 50(b) and 50(c) are diagrams illustrating a procedure in which the HLA-A allele, the HLA-B allele, and the CIITA allele were knocked out in two stages.

[0536] In the one-stage knockout, as shown in FIG. 50(a), first, Ff-Xt-28s05 iPS cells were transfected with A-ex3-g1 which is an sgRNA capable of targeting the HLA-A allele (where a target base sequence is set forth in SEQ ID NO: 55), B-ex2-g1 which is an sgRNA capable of targeting the HLA-B allele (where a target base sequence is set forth in SEQ ID NO: 53), and CIITA-ex3g5 which is an sgRNA capable of targeting the CIITA allele (where a target base sequence is set forth in SEQ ID NO: 8017), and a purified Cas9 protein. A commercially available kit (trade name “4D-Nucleofector,” model “V4XP-4032,” Lonza) was used for transfection.

[0537] Then, iPS cells were stimulated with 50 ng/mL IFN-γ for 48 hours and subjected to flow cytometric analysis to examine the expression of HLA-A24 antigen and HLA-B7 antigen. FIG. 51(a) is a graph showing results of flow cytometry. In FIG. 51(a), “No stain” indicates the analysis result of iPS cells that were not stained with an antibody, “No TF” indicates the analysis results of iPS cells into which sgRNA was not introduced, “HLA-A-ex3g1” indicates the results of introduction of A-ex3-g1 (where a target base sequence is set forth in SEQ ID NO: 55), “HLA-B-ex2g1” indicates the results of introducing B-ex2-g1 (where a target base sequence is set forth in SEQ ID NO: 53), and CIITA-ex3g5 indicates the results of introducing CIITA-ex3g5 (where a target base sequence is set forth in SEQ ID NO: 8017).

[0538] Subsequently, cell populations in which both HLA-A24 antigen and HLA-B7 antigen were negative were sorted and recovered, and subclones of 15 strains were obtained. Then, a base sequence of the HLA-A24 allele, HLA-B7 allele, and CIITA allele of the genome of each subclone was analyzed. FIG. 51(b) is a table showing a base mutation pattern of each subclone. In FIG. 51(b), “Clone ID” indicates the subclone name, “WT” indicates that it was a wild-type base sequence, “−” had a deletion mutation, “+” indicates that it had an insertion mutation, and “N.D.” indicates that a base sequence was not determined. Furthermore, “ABTo” in the subclone name means that the HLA-A allele, HLA-B allele, and CIITA allele were knocked out.

[0539] As a result, as shown in FIG. 51(b), clones #1, #2, #3, #6, #13, and #15 were obtained in which insertion deletion mutations (lndel mutations) were detected in all of the HLA-A allele, HLA-B allele, and CIITA allele.

[0540] In the two-stage knockout, as shown in FIG. 50(b), first, Ff-Xt-28s05 iPS cells were transfected with A-ex3-g1 which is an sgRNA capable of targeting the HLA-A allele (where a target base sequence is set forth in SEQ ID NO: 55), B-ex2-g1 which is an sgRNA capable of targeting the HLA-B allele (where a target base sequence is set forth in SEQ ID NO: 53), and a purified Cas9 protein. Thereby, subclones of 17 strains were obtained. A commercially available kit (trade name “4D-Nucleofector,” model “V4XP-4032,” Lonza) was used for transfection.

[0541] Then, a base sequence of the HLA-A24 allele and HLA-B7 allele of the genome of each subclone was analyzed. FIG. 52(a) is a table showing a base mutation pattern of each subclone. In FIG. 52(a), “Clone ID” indicates the subclone name, “WT” indicates that it was a wild-type base sequence, “−” had a deletion mutation, “+” indicates that it had an insertion mutation, and “Mut.” indicates that it had a substitution mutation. Furthermore, “ABo” in the subclone name means that the HLA-A allele and HLA-B allele were knocked out.

[0542] As a result, as shown in FIG. 52(a), clone #14 was obtained in which insertion deletion mutations (Indel mutations) were detected in both of the HLA-A allele and the HLA-B allele.

[0543] Subsequently, as shown in FIG. 50(c), the obtained clone #14 was transfected with CIITA-ex3g5 (where a target base sequence is set forth in SEQ ID NO: 8017), which is an sgRNA capable of targeting the CIITA allele, and a purified Cas9 protein. Thereby, subclones of 12 strains were obtained. A commercially available kit (trade name “4D-Nucleofector,” model “V4XP-4032,” Lonza) was used for transfection.

[0544] Then, a base sequence of the CIITA allele of the genome of each subclone was analyzed. FIG. 52(b) is a table showing a base mutation pattern of each subclone. In FIG. 52(b), “Clone ID” indicates the subclone name, “WT” indicates that it was a wild-type base sequence, “−” had a deletion mutation, “+” indicates that it had an insertion mutation, and “N.D.” indicates that a base sequence was not determined. Furthermore, “ABo_To” in the subclone name means that the HLA-A and HLA-B alleles were knocked out, subcloned once, and then the CIITA allele was knocked out.

[0545] As a result, as shown in FIG. 52(b), clones #14-3, #14-4, #14-6, and #14-12 were obtained in which insertion deletion mutations (Indel mutations) that were frameshift mutations were detected in both alleles of CIITA.

[0546] FIG. 53 is a table showing allele frequency of an HLC-C allele in various races. In FIG. 53, “JPN” indicates Japanese, “EUR” indicates European American, “AFA” indicates African American, “API” indicates Asian, and “HIS” indicates Hispanic. In addition, “allele frequency” indicates frequency (%) of an allele in each race, and “rank” indicates the order of frequency from the highest frequency.

[0547] As shown in FIG. 53, it is possible to cover 93% or more of the population in any of the above races by producing 12 kinds of cells, which are HLA-C*01:02, HLA-C*02:02, HLA-C*03:03, HLA-C*03:04, HLA-C*04:01, HLA-C*05:01, HLA-C*06:02, HLA-C*07:01, HLA-C*07:02, HLA-C*08:01, HLA-C*12:02, and HLA-C*16:01.

[0548] That is, cells deficient in the HLA-A and HLA-B alleles and having any of the above 12 kinds of the HLA-C alleles, or cells deficient in the HLA-A allele, HLA-B allele, and CIITA allele and having any of the above 12 kinds of the HLA-C alleles are very useful as cells for cell therapy and regenerative medicine. The cells are not particularly limited as long as they are cells used for cell therapy, and they may be pluripotent stem cells or differentiated cells. Specifically, for example, iPS cells, T cells, hematopoietic stem cells, mesenchymal stem cells, and the like may be used.

### Experimental Example 43

### (Production 3 of B2M Knockout iPS Cell)

[0549] A B2M allele was knocked out from the iPS stock cells (Ff-Xt-28s05 iPS cells) also used in Experimental Example 41.

[0550] Ff-Xt-28s05 iPS cells were transfected with B2M-g2, which is an sgRNA capable of targeting the B2M allele (where a target base sequence is set forth in SEQ ID NO: 60) and a purified Cas9 protein. Thereby, subclones of 5 strains were obtained. A commercially available kit (trade name “4D-Nucleofector,” model “V4XP-4032,” Lonza) was used for transfection.

[0551] Then, a base sequence of the B2M allele of the genome of each subclone was analyzed. FIG. 54 is a table showing a base mutation pattern of each subclone. In FIG. 54, “Clone ID” indicates the subclone name, “WT” indicates that it was a wild-type base sequence, “−” had a deletion mutation, and “+” indicates that it had an insertion mutation. Furthermore, “Mo” in the subclone name means that the B2M allele was knocked out.

[0552] As a result, as shown in FIG. 54, clones #1 and #3 having frameshift mutations in the B2M allele were obtained.

### Experimental Example 44

### (Preparation of B2M and CIITA Knockout iPS Cells)

[0553] A B2M allele and a CIITA allele were knocked out at the same time from the iPS stock cells (Ff-Xt-28s05 iPS cells) also used in Experimental Example 41.

[0554] Ff-Xt-28s05 iPS cells were transfected with B2M-g2 which is an sgRNA capable of targeting the B2M allele (where a target base sequence is set forth in SEQ ID NO: 60), CIITA-ex3g5 which is an sgRNA capable of targeting the CIITA allele (where a target base sequence is set forth in SEQ ID NO: 8017), and a purified Cas9 protein. Thereby, subclones of 19 strains were obtained. A commercially available kit (trade name “4D-Nucleofector,” model “V4XP-4032,” Lonza) was used for transfection.

[0555] Then, a base sequence of the B2M and CIITA alleles of the genome of each subclone was analyzed. FIG. 55 is a table showing a base mutation pattern of each subclone. In FIG. 55, “Clone ID” indicates the subclone name, “WT” indicates that it was a wild-type base sequence, “−” had a deletion mutation, and “+” indicates that it had an insertion mutation. Furthermore, “MTo” in the subclone name means that the B2M allele and the CIITA allele were knocked out in one stage.

[0556] As a result, as shown in FIG. 55, clone #8 having a frameshift mutation in both the B2M allele and the CIITA allele was obtained.

[0557] Furthermore, it was revealed that in clone #2, only one of the B2M alleles was knocked out, and both of the CIITA alleles were knocked out. Accordingly, the clone #2 was obtained as a cell strain in which substantially only the CIITA allele was knocked out.

### Experimental Example 45

### (Examination of HLA Protein Expression in B2M and CIITA Knockout iPS Cells)

[0558] Expression of HLA-ABC protein in Ff-Xt-28s05-MTo #2 iPS cells produced in Experimental Example 44 was examined

[0559] First, Ff-Xt-28s05-MTo #2 iPS cells were stimulated with 50 ng/mL IFN-γ for 48 hours. Thereafter, the cells were stained with an anti-HLA-ABC antibody (product number: 311418, BIOLEGEND) to be subjected to flow cytometric analysis, and expression of HLA-A protein, HLA-B protein, and HLA-C protein was examined.

[0560] FIGS. 56(a) and 56(b) are graphs showing results of flow cytometry. In FIG. 56(a), “No stain” indicates the analysis results of iPS cells not stained with the antibody. Furthermore, in FIG. 16(b), “Ff-Xt-28s05-MTo #2” indicates the analysis results of Ff-Xt-28s05-MTo #2 iPS cells.

[0561] As a result, it was revealed that the Ff-Xt-28s05-MTo #2 iPS cells maintained an expression ability of HLA-A protein, HLA-B protein, and HLA-C protein.

### Experimental Example 46

### (Production 4 of B2M Knockout iPS Cell)

[0562] 585A1 iPS cells were transfected with a plasmid vector expressing Cas9 and B2M-specific sgRNA. B2M-g2 (where a target base sequence is set forth in SEQ ID NO: 60) was used as sgRNA.

[0563] Subsequently, cells stimulated with 50 ng/mL IFN-γ for 48 hours were stained with an anti-HLA-ABC antibody, and flow cytometric analysis was performed.

[0564] FIG. 57 is a graph showing results of flow cytometry. In FIG. 57, “No stain” indicates the analysis results of iPS cells that were not stained with an antibody, “No TE” indicates the analysis results of iPS cells into which sgRNA was not introduced, and “B2M-g2” indicates the analysis results of iPS cells into which this sgRNA was introduced and in which the B2M allele was knocked out.

[0565] As a result, a proportion of the cell population in which all of HLA-A protein, HLA-B protein, and HLA-C protein were negative was 27.0%. Subsequently, a cell population which was obtained by the introduction of B2M-g2 sgRNA and in which all of HLA-A, HLA-B, and HLA-C were negative was recovered by sorting. No subcloning was performed herein.

### Experimental Example 47

### (HLA-Allele-Specific Knockout 10)

[0566] HLA-A, HLA-B, and HLA-C alleles of 585A1 iPS cells were knocked out to produce cells. Specifically, a purified Cas9 protein, an sgRNA specific to C*07:02 allele, and an sgRNA specific to C*12:02 allele were transfected to the cells (clone #3) which were produced in Experimental Example 13 and in which the A*24:02 allele, B*07:02 allele, and B*52:01 allele of the 585A1 iPS cells were knocked out.

[0567] C0702-ex3-g3 (where a target base sequence is set forth in SEQ ID NO: 49) was used as the sgRNA specific to the C*07:02 allele. In addition, C1202-ex3-g1 (where a target base sequence is set forth in SEQ ID NO: 50) was used as the sgRNA specific to the C*12:02 allele. A commercially available kit (trade name “4D-Nucleofector,” model “V4XP-4032,” Lonza) was used for transfection.

[0568] Thereafter, subcloning was performed to obtain subclones of six strains. Subsequently, genomic DNA was extracted from each subclone. Subsequently, base sequences of the HLA-C*07:02 allele and the HLA-C*12:02 allele were analyzed by Sanger sequence.

[0569] FIG. 58 is a table showing a base mutation pattern of each clone recovered. In FIG. 58, “Clone ID” indicates the subclone name, “HLA-007” indicates the HLA-C*07:02 allele, “HLA-C12” indicates the HLA-C*12:02 allele, “WT” indicates that it was a wild-type base sequence, “−” had a deletion mutation, and “+” indicates that it had an insertion mutation. As a result, it was confirmed that both HLA-C alleles were knocked out in clones #3-4, #3-5, #3-6, and #3-7.

### Experimental Example 48

### (HLA-Allele-Specific Knockout 11)

[0570] A purified Cas9 protein and an sgRNA specific to C*07:02 allele were transfected to the cells (clone #3) which were produced in Experimental Example 13 and in which the A*24:02 allele, B*07:02 allele, and B*52:01 allele of the 585A1 iPS cells were knocked out.

[0571] C0702-ex3-g3 (where a target base sequence is set forth in SEQ ID NO: 49) was used as the sgRNA specific to the C*07:02 allele. A commercially available kit (trade name “4D-Nucleofector,” model “V4XP-4032,” Lonza) was used for transfection.

[0572] Thereafter, subcloning was performed to obtain subclones of six strains. Subsequently, genomic DNA was extracted from each subclone. Subsequently, base sequences of the HLA-C*07:02 allele and the HLA-C*12:02 allele were analyzed by Sanger sequence.

[0573] FIG. 59 is a table showing a base mutation pattern of each clone recovered. In FIG. 59, “Clone ID” indicates the subclone name, “HLA-007” indicates the HLA-C*07:02 allele, “HLA-C12” indicates the HLA-C*12:02 allele, “WT” indicates that it was a wild-type base sequence, and “+” indicates that it had an insertion mutation. As a result, it was confirmed that the HLA-C*07:02 allele was knocked out and only the HLA-C*12:02 allele was left in the clones #3-1, #3-2, #3-3, #3-5, and #3-6.

[0574] As described above with reference to FIG. 53, by preparing 12 kinds of cells, which are HLA-C*01:02, HLA-C*02:02, HLA-C*03:03, HLA-C*03:04, HLA-C*04:01, HLA-C*05:01, HLA-C*06:02, HLA-C*07:01, HLA-C*07:02, HLA-C*08:01, HLA-C*12:02, and HLA-C*16:01, it is possible to cover a population of 93% or more in any race of Japanese, European American, African American, Asian, and Hispanic.

[0575] The cells produced in the present experimental example can be used as one of these 12 kinds of cells.

### Experimental Example 49

### (HLA-Allele-Specific Knockout 12)

[0576] A purified Cas9 protein and an sgRNA specific to C*07:02 allele were transfected to the cells (clone #4) which were produced in Experimental Example 14 and in which the A*01:01 allele, A*24:02 allele, B*07:02 allele, and B*37:01 allele of the 604B1 iPS cells were knocked out.

[0577] C0702-ex3-g3 (where a target base sequence is set forth in SEQ ID NO: 49) was used as the sgRNA specific to the C*07:02 allele. A commercially available kit (trade name “4D-Nucleofector,” model “V4XP-4032,” Lonza) was used for transfection.

[0578] Thereafter, subcloning was performed to obtain subclones of 11 strains. Subsequently, genomic DNA was extracted from each subclone. Subsequently, base sequences of the HLA-C*06:02 allele and the HLA-C*12:02 allele were analyzed by Sanger sequence.

[0579] FIG. 60 is a table showing a base mutation pattern of each clone recovered. In FIG. 60, “Clone ID” indicates the subclone name, “HLA-006” indicates the HLA-C*06:02 allele, “HLA-007” indicates the HLA-C*07:02 allele, “WT” indicates that it was a wild-type base sequence, “−” had an insertion mutation, and “+” indicates that it had an insertion mutation. As a result, it was confirmed that the HLA-C*07:02 allele was knocked out and only the HLA-C*06:02 allele was left in the clones #4-2, #4-6, #4-10, and #4-11.

[0580] As described above with reference to FIG. 53, by preparing 12 kinds of cells, which are HLA-C*01:02, HLA-C*02:02, HLA-C*03:03, HLA-C*03:04, HLA-C*04:01, HLA-C*05:01, HLA-C*06:02, HLA-C*07:01, HLA-C*07:02, HLA-C*08:01, HLA-C*12:02, and HLA-C*16:01, it is possible to cover a population of 93% or more in any race of Japanese, European American, African American, Asian, and Hispanic.

[0581] The cells produced in the present experimental example can be used as one of these 12 kinds of cells.

### INDUSTRIAL APPLICABILITY

[0582] According to the present invention, it is possible to provide a technique for producing a low-antigenic cell in which a rejection reaction is reduced in a case where the cell is allogeneically transplanted into a recipient.

The application's sequence listing, which the Patent Office published only in electronic form, follows.

SEQUENCE LISTING (8017 sequences)

SEQ ID NO: 1 - DNA, 27 bp, Homo sapiens
gtaccaccagtacgcctacgacggcaa

SEQ ID NO: 2 - DNA, 27 bp, Homo sapiens
gtaccagcaggacgcctacgacggcaa

SEQ ID NO: 3 - DNA, 23 bp, Homo sapiens
taccaccagtacgcctacgacgg

SEQ ID NO: 4 - DNA, 23 bp, Homo sapiens
tgccgtcgtaggcgtactggtgg

SEQ ID NO: 5 - DNA, 27 bp, Homo sapiens
tcacaccgtccagaggatgtgtggctg

SEQ ID NO: 6 - DNA, 27 bp, Homo sapiens
tcacaccatccagatgatgtatggctg

SEQ ID NO: 7 - DNA, 23 bp, Homo sapiens
cacaccgtccagaggatgtgtgg

SEQ ID NO: 8 - DNA, 19 bp, Homo sapiens
gggtaccggcaggacgcct

SEQ ID NO: 9 - DNA, 15 bp, Homo sapiens
gggtaccggccgcct

SEQ ID NO: 10 - DNA, 16 bp, Homo sapiens
acaaggcccaggcaca

SEQ ID NO: 11 - DNA, 14 bp, Homo sapiens
acaacccaggcaca

SEQ ID NO: 12 - DNA, 13 bp, Homo sapiens
ggcaggacgccta

SEQ ID NO: 13 - DNA, 14 bp, Homo sapiens
ggtgtgagagatgt

SEQ ID NO: 14 - DNA, 13 bp, Homo sapiens
tcttggaccgcgg

SEQ ID NO: 15 - DNA, 14 bp, Homo sapiens
tcttggaaccgcgg

SEQ ID NO: 16 - DNA, 13 bp, Homo sapiens
tcttggaccgcgg

SEQ ID NO: 17 - DNA, 14 bp, Homo sapiens
tcttggaaccgcgg

SEQ ID NO: 18 - DNA, 14 bp, Homo sapiens
agtattgggaccgg

SEQ ID NO: 19 - DNA, 13 bp, Homo sapiens
agtattggaccgg

SEQ ID NO: 20 - DNA, 14 bp, Homo sapiens
tgggaccgggagac

SEQ ID NO: 21 - DNA, 14 bp, Homo sapiens
gtattgggaccggg

SEQ ID NO: 22 - DNA, 23 bp, Homo sapiens
gtattggcaattctgtgaccggg

SEQ ID NO: 23 - DNA, 17 bp, Homo sapiens
gaggggccggagtattg

SEQ ID NO: 24 - DNA, 40 bp, Homo sapiens
ggacctgcgctcttggaccgcggcggacatggcggctcag

SEQ ID NO: 25 - DNA, 40 bp, Homo sapiens
ggayctgasctctkggaamtggssggttcraatcaccars

SEQ ID NO: 26 - DNA, 16 bp, Homo sapiens
cacccagttcgtgagg

SEQ ID NO: 27 - DNA, 15 bp, Homo sapiens
cacccagtcgtgagg

SEQ ID NO: 28 - DNA, 14 bp, Homo sapiens
cacccagttcgtga

SEQ ID NO: 29 - DNA, 15 bp, Homo sapiens
cacccagtttcgtga

SEQ ID NO: 30 - DNA, 36 bp, Homo sapiens
cagaggatgtacggctgcgacctggggcccgacggg

SEQ ID NO: 31 - DNA, 35 bp, Homo sapiens
cagagatgtacggctgcgacctggggcccgacggg

SEQ ID NO: 32 - DNA, 38 bp, Homo sapiens
gccgagatgtctcgctccgtggccttagctgtgctcgc

SEQ ID NO: 33 - DNA, 36 bp, Homo sapiens
gccgagatgtctcgcckyggyctyctytgytgtcst

SEQ ID NO: 34 - DNA, 30 bp, Homo sapiens
tcgggccgagatgtctcgctccgtggcctt

SEQ ID NO: 35 - DNA, 31 bp, Homo sapiens
tcgggccgagatgtctcgcttccgtggcctt

SEQ ID NO: 36 - DNA, 24 bp, Homo sapiens
tcgggccgagatskckctwgtctc

SEQ ID NO: 37 - DNA, 31 bp, Homo sapiens; identical to SEQ ID NO: 35

SEQ ID NO: 38 - DNA, 25 bp, Homo sapiens
tcgggccgagatgtctcgtggcctt

SEQ ID NO: 39 - DNA, 76 bp, Artificial Sequence
  Synthesyzed oligonucleotide
gttttagagctagaaatagcaagttaaaataaggctagtccgttatcaacttgaaaaagtggcaccgagtcggtgc

SEQ ID NO: 40 - DNA, 23 bp, Homo sapiens
  misc_feature (1)..(21): n is a, c, g, or t
nnnnnnnnnnnnnnnnnnnnngg

SEQ ID NO: 41 - DNA, 19 bp, Artificial Sequence
  Synthesized oligonucleotide
ttggggattccccaactcc

SEQ ID NO: 42 - DNA, 18 bp, Artificial Sequence
  Synthesized oligonucleotide
gtccactgttccgcccaa

SEQ ID NO: 43 - DNA, 20 bp, Artificial Sequence
  Synthesized oligonucleotide
ggtccggagtattgggacgg

SEQ ID NO: 44 - DNA, 20 bp, Artificial Sequence
  Synthesized oligonucleotide
tctcaactgctccgccacat

SEQ ID NO: 45 - DNA, 23 bp, Homo sapiens
ggcgcttcctccgcgggtaccgg

SEQ ID NO: 46 - DNA, 23 bp, Homo sapiens
tgccgtcgtaggcgtcctgccgg

SEQ ID NO: 47 - DNA, 23 bp, Homo sapiens
cacacagatctacaaggcccagg

SEQ ID NO: 48 - DNA, 24 bp, Homo sapiens
gacagcgacgccgcgagtccgagg

SEQ ID NO: 49 - DNA, 23 bp, Homo sapiens
gatctgagccgcggtgtccgcgg

SEQ ID NO: 50 - DNA, 23 bp, Homo sapiens
ggtcgcagccgtacatcctctgg

SEQ ID NO: 51 - DNA, 23 bp, Homo sapiens
aggcgtactggttatgcccgcgg

SEQ ID NO: 52 - DNA, 23 bp, Homo sapiens
ggtcgcagccatacatccactgg

SEQ ID NO: 53 - DNA, 23 bp, Homo sapiens
gctgtcgaacctcacgaactggg

SEQ ID NO: 54 - DNA, 22 bp, Homo sapiens
ggggccggagtattgggaccgg

SEQ ID NO: 55 - DNA, 23 bp, Homo sapiens
ggacctgcgctcttggaccgcgg

SEQ ID NO: 56 - DNA, 1377 bp, Homo sapiens
cttttttataatgccaactttgtacaaaaaagcaggctggcgccggaaccaattcagtcgacggtcgcggtcgctgttctaaagtccgcacgcacccaccgggactcagattctccccagacgccgaggatggccgtcatggcgccccgaaccctcctcctgctactctcgggggccctggccctgacccagacctgggcgggtgagtgcggggtcgggagggaaaccgcctctgcggggagaagcaaggggccctcctggcgggggcgcaggaccgggggagccgcgccgggaggagggtcgggcaggtctcagccactgctcgcccccaggctcccactccatgaggtatttcttcacatccgtgtcccggcccggccgcggggagccccgcttcatcgccgtgggctacgtggacgacacgcagttcgtgcggttcgacagcgacgccgcgagccagaagatggagccgcgggcgccgtggatagagcaggaggggccggagtattgggaccaggagacacggaatatgaaggcccactcacagactgaccgagcgaacctggggaccctgcgcggctactacaaccagagcgaggacggtgagtgaccccggcccggggcgcaggtcacgacccctcatcccccacggacgggccaggtcgcccacagtctccgggtccgagatccaccccgaagccgcgggactccgagacccttgtcccgggagaggcccaggcgcctttacccggtttcattttcagtttaggccaaaaatccccccgggttggtcggggcggggcggggctcgggggactgggctgaccgcggggtcggggccaggttctcacaccatccagataatgtatggctgcgacgtggggccggacgggcgcttcctccgcgggtaccggcaggacgcctacgacggcaaggattacatcgccctgaacgaggacctgcgctcttggaccgcggcggacatggcagctcagatcaccaagcgcaagtgggaggcggtccatgcggcggagcagcggagagtctacctggagggccggtgcgtggacgggctccgcagatacctggagaacgggaaggagacgctgcagcgcacgggtaccaggggccacggggcgcctccctgatcgcctatagatctcccgggctggcctcccacaaggaggggagacaattgggaccaacactagaatatcaccctccctctggtcctgagggagaggaatcctcctgggtttccagatcctgtaccagagagtgactctgaggttccgccctgctctctgacacaattaagggataaaatctctgaaggagtgacgggaagacgatccctcgaatactgatgatcgagat

SEQ ID NO: 57 - DNA, 34 bp, Artificial Sequence
  Synthesized oligonucleotide
ccaattcagtcgacggtcgcggtcgctgttctaa

SEQ ID NO: 58 - DNA, 39 bp, Artificial Sequence
  Synthesized oligonucleotide
gtctagatatctcgatcatcagtattcgagggatcgtct

SEQ ID NO: 59 - DNA, 22 bp, Homo sapiens
agtagcgcgagcacagctaagg

SEQ ID NO: 60 - DNA, 22 bp, Homo sapiens
gccgagatgtctcgctccgtgg

SEQ ID NO: 61 - DNA, 22 bp, Homo sapiens
ggtatcttacaggaactccagg

SEQ ID NO: 62 - RNA, 20 nt, Artificial Sequence
  Synthesized oligonucleotide named Spacer Sequence
  misc_feature (1)..(20): n is a, c, g, or u
nnnnnnnnnnnnnnnnnnnn

SEQ ID NO: 63 - RNA, 103 nt, Artificial Sequence
  Synthesized sgRNA
  misc_feature (1)..(20): n is a, c, g, or u
nnnnnnnnnnnnnnnnnnnnguuuuagagcuagaaauagcaaguuaaaauaaggcuaguccguuaucaacuugaaaaaguggcaccgagucggugcuuuuuuu

SEQ ID NO: 64 - RNA, 42 nt, Artificial Sequence
  Synthesized crRNA
  misc_feature (1)..(20): n is a, c, g, or u
nnnnnnnnnnnnnnnnnnnnguuuuagagcuaugcuguuuug

SEQ ID NO: 65 - RNA, 70 nt, Artificial Sequence
  Synthesized tracrRNA
caaaacagcauagcaaguuaaaauaaggcuaguccguuaucaacuugaaaaaguggcaccgagucggugc

SEQ ID NO: 66 - DNA, 19 bp, Homo sapiens
cttcacttcccaggtgcaa

SEQ ID NO: 67 - DNA, 20 bp, Homo sapiens
aggctagccaacatgaggaa

SEQ ID NO: 68 - DNA, 18 bp, Homo sapiens
ccaaccgcgagaagatga

SEQ ID NO: 69 - DNA, 20 bp, Homo sapiens
ccagaggcgtacagggatag

SEQ ID NO: 70 - DNA, 20 bp, Artificial Sequence
  Synthesized oligonucleotide
gggccggagtattgggacca

SEQ ID NO: 71 - DNA, 19 bp, Artificial Sequence
  Synthesized oligonucleotide
ctcaactgctccgccacat

SEQ ID NO: 72 - DNA, 23 bp, Homo sapiens
aaaaatccccctggttggtcggg

SEQ ID NO: 73 - DNA, 23 bp, Homo sapiens
aaaaggagggagttactctcagg

SEQ ID NO: 74 - DNA, 23 bp, Homo sapiens
aaaatccccctggttggtcgggg

SEQ ID NO: 75 - DNA, 23 bp, Homo sapiens
aaaatctctgaaggaatgaccgg

SEQ ID NO: 76 - DNA, 23 bp, Homo sapiens
aaacacaaggaaagcaagtgtgg

SEQ ID NO: 77 - DNA, 23 bp, Homo sapiens
aaacccctcaccctgagatgggg

SEQ ID NO: 78 - DNA, 23 bp, Homo sapiens
aaaccgggtaaaggcgcctgggg

SEQ ID NO: 79 - DNA, 23 bp, Homo sapiens
aaaccgggtaaagtcgcctgggg

SEQ ID NO: 80 - DNA, 23 bp, Homo sapiens
aaaccgggttaaaggcgcctggg

SEQ ID NO: 81 - DNA, 23 bp, Homo sapiens
aaagagacgctgcagcgcgcagg

SEQ ID NO: 82 - DNA, 23 bp, Homo sapiens
aaaggcacctgggcctctcccgg

SEQ ID NO: 83 - DNA, 23 bp, Homo sapiens
aaagtcaccagtcacccacccgg

SEQ ID NO: 84 - DNA, 23 bp, Homo sapiens
aaatgatggcggcgggcgtgtgg

SEQ ID NO: 85 - DNA, 23 bp, Homo sapiens
aacacaaggaaagcaagtgtggg

SEQ ID NO: 86 - DNA, 23 bp, Homo sapiens
aaccctcctcctgctgctctagg

SEQ ID NO: 87 - DNA, 23 bp, Homo sapiens
aacgacgccgcgagtccgagagg

SEQ ID NO: 88 - DNA, 23 bp, Homo sapiens
aactcaggacacccagcttgtgg

SEQ ID NO: 89 - DNA, 23 bp, Homo sapiens
aactctcctcctgctgctctcgg

SEQ ID NO: 90 - DNA, 23 bp, Homo sapiens
aagacggctccgggaaaggaagg

SEQ ID NO: 91 - DNA, 23 bp, Homo sapiens
aagagcgcaggtcgtctttcagg

SEQ ID NO: 92 - DNA, 23 bp, Homo sapiens
aagagctcaggtggaaaaggagg

SEQ ID NO: 93 - DNA, 23 bp, Homo sapiens
aagcagggctccccgcggccggg

SEQ ID NO: 94 - DNA, 23 bp, Homo sapiens
aagcggagctccccgcggccggg

SEQ ID NO: 95 - DNA, 23 bp, Homo sapiens
aagcggcctctgcggagaggagg

SEQ ID NO: 96 - DNA, 23 bp, Homo sapiens
aagcgggactctccgcggccggg

SEQ ID NO: 97 - DNA, 23 bp, Homo sapiens
aagcggggctccccacggccggg

SEQ ID NO: 98 - DNA, 23 bp, Homo sapiens
aagcggggctccccgcagccggg

SEQ ID NO: 99 - DNA, 23 bp, Homo sapiens
aagcggggctccccgctgccggg

SEQ ID NO: 100 - DNA, 23 bp, Homo sapiens
aagcggggctcctcgcggccggg

SEQ ID NO: 101 - DNA, 23 bp, Homo sapiens
aagcggggctctccgcggcctgg

SEQ ID NO: 102 - DNA, 23 bp, Homo sapiens
aagcggggttccccgcggccggg

SEQ ID NO: 103 - DNA, 23 bp, Homo sapiens
aagcggtgctctccgcggccagg

SEQ ID NO: 104 - DNA, 23 bp, Homo sapiens
aaggaaacgctgcagcgcacggg

SEQ ID NO: 105 - DNA, 23 bp, Homo sapiens
aaggaaacgctgcagcgcgcggg

SEQ ID NO: 106 - DNA, 23 bp, Homo sapiens
aaggagaccctgcagcgcgcggg

SEQ ID NO: 107 - DNA, 23 bp, Homo sapiens
aaggagacgctgcaacgcgcggg

SEQ ID NO: 108 - DNA, 23 bp, Homo sapiens
aaggagacgctgcagagcgcggg

SEQ ID NO: 109 - DNA, 23 bp, Homo sapiens
aaggagacgctgcagcacgcggg

SEQ ID NO: 110 - DNA, 23 bp, Homo sapiens
aaggagacgctgcagcgcacagg

SEQ ID NO: 111 - DNA, 23 bp, Homo sapiens
aaggagacgctgcagcgcactgg

SEQ ID NO: 112 - DNA, 23 bp, Homo sapiens
aaggagacgctggagcgcgcggg

SEQ ID NO: 113 - DNA, 23 bp, Homo sapiens
aaggagatgctgcagcgcacggg

SEQ ID NO: 114 - DNA, 23 bp, Homo sapiens
aaggcacagactgaccgagtggg

SEQ ID NO: 115 - DNA, 23 bp, Homo sapiens
aaggcacctgggcctctcccggg

SEQ ID NO: 116 - DNA, 23 bp, Homo sapiens
aaggcccaggcacagactgacgg

SEQ ID NO: 117 - DNA, 23 bp, Homo sapiens
aaggcgcctggggctctcgccgg

SEQ ID NO: 118 - DNA, 23 bp, Homo sapiens
aaggggagccgcgggcgccgtgg

SEQ ID NO: 119 - DNA, 23 bp, Homo sapiens
aaggggtggggagtggggtctgg

SEQ ID NO: 120 - DNA, 23 bp, Homo sapiens
aagtccgagaggggagccccggg

SEQ ID NO: 121 - DNA, 23 bp, Homo sapiens
aagtcgcctggggctctctgcgg

SEQ ID NO: 122 - DNA, 23 bp, Homo sapiens
aagtcgctgttccctcgtcaggg

SEQ ID NO: 123 - DNA, 23 bp, Homo sapiens
aagtcgctgttccctctgcaggg

SEQ ID NO: 124 - DNA, 23 bp, Homo sapiens
aagtgaaactcagggaagtgggg

SEQ ID NO: 125 - DNA, 23 bp, Homo sapiens
aagtgaaactcttgggagtgggg

SEQ ID NO: 126 - DNA, 23 bp, Homo sapiens
aagtgatgccggtgggcgtgtgg

SEQ ID NO: 127 - DNA, 23 bp, Homo sapiens
aagtgatggcggtggccgtgtgg

SEQ ID NO: 128 - DNA, 23 bp, Homo sapiens
aagtgccatgttcagcacgaggg

SEQ ID NO: 129 - DNA, 23 bp, Homo sapiens
aatacctggtcagagcccgcagg

SEQ ID NO: 130 - DNA, 23 bp, Homo sapiens
aatcagcgtctccgcagtaccgg

SEQ ID NO: 131 - DNA, 23 bp, Homo sapiens
aatcagcgtctccgcagtccagg

SEQ ID NO: 132 - DNA, 23 bp, Homo sapiens
aatctgagccgcggtgtccgcgg

SEQ ID NO: 133 - DNA, 23 bp, Homo sapiens
aatctgtccttcattgtaacagg

SEQ ID NO: 134 - DNA, 23 bp, Homo sapiens
aatcttctattccctgacgaggg

SEQ ID NO: 135 - DNA, 23 bp, Homo sapiens
aatcttctattccctgcagaggg

SEQ ID NO: 136 - DNA, 23 bp, Homo sapiens
aatgcccacgatggggacagtgg

SEQ ID NO: 137 - DNA, 23 bp, Homo sapiens
aattcaggacactgagcttgtgg

SEQ ID NO: 138 - DNA, 23 bp, Homo sapiens
aattcatatcactcacagtgagg

SEQ ID NO: 139 - DNA, 23 bp, Homo sapiens
aattcatatctgtcacagtgagg

SEQ ID NO: 140 - DNA, 23 bp, Homo sapiens
aattgtcctagacagcagagggg

SEQ ID NO: 141 - DNA, 23 bp, Homo sapiens
aattgtgtcacagagcaggccgg

SEQ ID NO: 142 - DNA, 23 bp, Homo sapiens
acaagggtctcggagccccgcgg

SEQ ID NO: 143 - DNA, 23 bp, Homo sapiens
acacactgaccgagtggacctgg

SEQ ID NO: 144 - DNA, 23 bp, Homo sapiens
acaccaacacagacacatgcagg

SEQ ID NO: 145 - DNA, 23 bp, Homo sapiens
acaccacgcacgtgccctccagg

SEQ ID NO: 146 - DNA, 23 bp, Homo sapiens
acacccagcttgtggagaccagg

SEQ ID NO: 147 - DNA, 23 bp, Homo sapiens
acacggacctggcagcgggatgg

SEQ ID NO: 148 - DNA, 23 bp, Homo sapiens
acacggagctcgtggaggccagg

SEQ ID NO: 149 - DNA, 23 bp, Homo sapiens
acacgggccgcctcccacttggg

SEQ ID NO: 150 - DNA, 23 bp, Homo sapiens
acactgaccgagtggacctgggg

SEQ ID NO: 151 - DNA, 23 bp, Homo sapiens
acactgacctgacagcgggatgg

SEQ ID NO: 152 - DNA, 23 bp, Homo sapiens
acactgacctggtagcgggatgg

SEQ ID NO: 153 - DNA, 23 bp, Homo sapiens
acactgatctggcagtgggatgg

SEQ ID NO: 154 - DNA, 23 bp, Homo sapiens
acagaacccaaacaccagcctgg

SEQ ID NO: 155 - DNA, 23 bp, Homo sapiens
acagaacccagacaccagcccgg

SEQ ID NO: 156 - DNA, 23 bp, Homo sapiens
acagacctcaggagggcgattgg

SEQ ID NO: 157 - DNA, 23 bp, Homo sapiens
acagcagagggggccctcagagg

SEQ ID NO: 158 - DNA, 23 bp, Homo sapiens
acagccacgccgcgagtccgagg

SEQ ID NO: 159 - DNA, 23 bp, Homo sapiens
acagcccctcgtgctgcacatgg

SEQ ID NO: 160 - DNA, 23 bp, Homo sapiens
acagcgacgccgcgagccaaagg

SEQ ID NO: 161 - DNA, 23 bp, Homo sapiens
acagcgacgctgcgagtccgagg

SEQ ID NO: 162 - DNA, 23 bp, Homo sapiens
acaggacatttgcttcccacagg

SEQ ID NO: 163 - DNA, 23 bp, Homo sapiens
acaggggctaacgcagcctgggg

SEQ ID NO: 164 - DNA, 23 bp, Homo sapiens
acatctctgaggaaatggagggg

SEQ ID NO: 165 - DNA, 23 bp, Homo sapiens
acatgccaggtacagcatgaggg

SEQ ID NO: 166 - DNA, 23 bp, Homo sapiens
accagcggacgcaggcacctggg

SEQ ID NO: 167 - DNA, 23 bp, Homo sapiens
accagtacgcctacgacggcagg

SEQ ID NO: 168 - DNA, 23 bp, Homo sapiens
accagtcacccacccggactcgg

SEQ ID NO: 169 - DNA, 23 bp, Homo sapiens
acccaataggagtgagaactggg

SEQ ID NO: 170 - DNA, 23 bp, Homo sapiens
acccaattggagtgagaactggg

SEQ ID NO: 171 - DNA, 23 bp, Homo sapiens
acccagacaccagcggacgcagg

SEQ ID NO: 172 - DNA, 23 bp, Homo sapiens
acccagcagtcacaagtcacagg

SEQ ID NO: 173 - DNA, 23 bp, Homo sapiens
acccagttctcactccaattggg

SEQ ID NO: 174 - DNA, 23 bp, Homo sapiens
acccagttctcactcccatcggg

SEQ ID NO: 175 - DNA, 23 bp, Homo sapiens
acccagttctcactcctattggg

SEQ ID NO: 176 - DNA, 23 bp, Homo sapiens
accccaacaccataatatcaagg

SEQ ID NO: 177 - DNA, 23 bp, Homo sapiens
accccacgcacaggccctccagg

SEQ ID NO: 178 - DNA, 23 bp, Homo sapiens
acccctcattccccacggacggg

SEQ ID NO: 179 - DNA, 23 bp, Homo sapiens
acccgatgggagtgagaactggg

SEQ ID NO: 180 - DNA, 23 bp, Homo sapiens
acccgcccaggtctcggtcaggg

SEQ ID NO: 181 - DNA, 23 bp, Homo sapiens
acccgggaagccgcgcagggagg

SEQ ID NO: 182 - DNA, 23 bp, Homo sapiens
acccggggagccgcgccggtagg

SEQ ID NO: 183 - DNA, 23 bp, Homo sapiens
accctcctcctgctgctctaggg

SEQ ID NO: 184 - DNA, 23 bp, Homo sapiens
accctgagatgggataaggaggg

SEQ ID NO: 185 - DNA, 23 bp, Homo sapiens
accctgagatgggttaaggaggg

SEQ ID NO: 186 - DNA, 23 bp, Homo sapiens
accctgaggtgctgggccatggg

SEQ ID NO: 187 - DNA, 23 bp, Homo sapiens
accggaacacacagatcttcagg

SEQ ID NO: 188 - DNA, 23 bp, Homo sapiens
accggtcatacccgcggaggagg

SEQ ID NO: 189 - DNA, 23 bp, Homo sapiens
accggtgagtgaccccggcccgg

SEQ ID NO: 190 - DNA, 23 bp, Homo sapiens
accgtgagtgaccccggcccggg

SEQ ID NO: 191 - DNA, 23 bp, Homo sapiens
accgtggtggttgtggtgttggg

SEQ ID NO: 192 - DNA, 23 bp, Homo sapiens
acctcaactgaaaatgaaaccgg

SEQ ID NO: 193 - DNA, 23 bp, Homo sapiens
acctcaaggagtgggagcctggg

SEQ ID NO: 194 - DNA, 23 bp, Homo sapiens
acctcatgaagtgggagcctggg

SEQ ID NO: 195 - DNA, 23 bp, Homo sapiens
acctcatggagagggagcctggg

SEQ ID NO: 196 - DNA, 23 bp, Homo sapiens
acctcatggagtaggagcctggg

SEQ ID NO: 197 - DNA, 23 bp, Homo sapiens
acctcatggagtggaagcctggg

SEQ ID NO: 198 - DNA, 23 bp, Homo sapiens
acctcatggagtgggaacctggg

SEQ ID NO: 199 - DNA, 23 bp, Homo sapiens
acctcccggcgcggctccccggg

SEQ ID NO: 200 - DNA, 23 bp, Homo sapiens
acctccctgcgccgctccccggg

SEQ ID NO: 201 - DNA, 23 bp, Homo sapiens
acctctggtcctgacctgagtgg

SEQ ID NO: 202 - DNA, 23 bp, Homo sapiens
acctgagctcctggcggacacgg

SEQ ID NO: 203 - DNA, 23 bp, Homo sapiens
acctgcgctcctggaccgccggg

SEQ ID NO: 204 - DNA, 23 bp, Homo sapiens
acctgcgctcctggacgcggcgg

SEQ ID NO: 205 - DNA, 23 bp, Homo sapiens
acctggagggcctgtgcgtgggg

SEQ ID NO: 206 - DNA, 23 bp, Homo sapiens
accttaatggttgtggtgttggg

SEQ ID NO: 207 - DNA, 23 bp, Homo sapiens
accttgatattatggtgttgggg

SEQ ID NO: 208 - DNA, 23 bp, Homo sapiens
accttggtggttgtggcgttggg

SEQ ID NO: 209 - DNA, 23 bp, Homo sapiens
acgacgccgcgagtccgagaggg

SEQ ID NO: 210 - DNA, 23 bp, Homo sapiens
acgaggacctgagctcctggcgg

SEQ ID NO: 211 - DNA, 23 bp, Homo sapiens
acgatgtatggctgcgacatggg

SEQ ID NO: 212 - DNA, 23 bp, Homo sapiens
acgcgggtaccaggggcagtggg

SEQ ID NO: 213 - DNA, 23 bp, Homo sapiens
acgctgcagcgcgcgggtaccgg

SEQ ID NO: 214 - DNA, 23 bp, Homo sapiens
acggacctggcagcgggatgggg

SEQ ID NO: 215 - DNA, 23 bp, Homo sapiens
acggccattctcggcgtctgggg

SEQ ID NO: 216 - DNA, 23 bp, Homo sapiens
acggccgggccgggacatggcgg

SEQ ID NO: 217 - DNA, 23 bp, Homo sapiens
acggcggtgtagatacctcatgg

SEQ ID NO: 218 - DNA, 23 bp, Homo sapiens
acggctctgggaaaaggggaagg

SEQ ID NO: 219 - DNA, 23 bp, Homo sapiens
acggggctggccgcggggccggg

SEQ ID NO: 220 - DNA, 23 bp, Homo sapiens
acggtgagtgaccccggcctggg

SEQ ID NO: 221 - DNA, 23 bp, Homo sapiens
acggtgcccaaggctgctgcagg

SEQ ID NO: 222 - DNA, 23 bp, Homo sapiens
acgtcatggagtgggagcctggg

SEQ ID NO: 223 - DNA, 23 bp, Homo sapiens
acgtgccatgtgcagcatgaggg

SEQ ID NO: 224 - DNA, 23 bp, Homo sapiens
acgtgcgtggagtggctccgcgg

SEQ ID NO: 225 - DNA, 23 bp, Homo sapiens
acgttggacaggaggaattatgg

SEQ ID NO: 226 - DNA, 23 bp, Homo sapiens
actacaaccagagcgaggccggg

SEQ ID NO: 227 - DNA, 23 bp, Homo sapiens
actagaattctccacggaatagg

SEQ ID NO: 228 - DNA, 23 bp, Homo sapiens
actagccgcgcagggtccccagg

SEQ ID NO: 229 - DNA, 23 bp, Homo sapiens
actccacacacaggccctccagg

SEQ ID NO: 230 - DNA, 23 bp, Homo sapiens
actccacacacgtgccctccagg

SEQ ID NO: 231 - DNA, 23 bp, Homo sapiens
actccacgaacgtgccctccagg

SEQ ID NO: 232 - DNA, 23 bp, Homo sapiens
actccacgaactcgccctccagg

SEQ ID NO: 233 - DNA, 23 bp, Homo sapiens
actccacgcacagaccctccagg

SEQ ID NO: 234 - DNA, 23 bp, Homo sapiens
actccacgcacaggccctcccgg

SEQ ID NO: 235 - DNA, 23 bp, Homo sapiens
actccacgcacgtgcccaccagg

SEQ ID NO: 236 - DNA, 23 bp, Homo sapiens
actccacgcacgtgtcctccagg

SEQ ID NO: 237 - DNA, 23 bp, Homo sapiens
actccacgcacgttccctccagg

SEQ ID NO: 238 - DNA, 23 bp, Homo sapiens
actccacgcacttgccctccagg

SEQ ID NO: 239 - DNA, 23 bp, Homo sapiens
actccacgcgcgtgccctccagg

SEQ ID NO: 240 - DNA, 23 bp, Homo sapiens
actccacgtacgtgccctccagg

SEQ ID NO: 241 - DNA, 23 bp, Homo sapiens
actccactcacgtgccctccagg

SEQ ID NO: 242 - DNA, 23 bp, Homo sapiens
actccatgcacgtgccctccagg

SEQ ID NO: 243 - DNA, 23 bp, Homo sapiens
actcctcgcacaggccctccagg

SEQ ID NO: 244 - DNA, 23 bp, Homo sapiens
actcctttctgggatctcacagg

SEQ ID NO: 245 - DNA, 23 bp, Homo sapiens
actctcctcctgctgctctcggg

SEQ ID NO: 246 - DNA, 23 bp, Homo sapiens
actctgaggtgctgggccctggg

SEQ ID NO: 247 - DNA, 23 bp, Homo sapiens
actgacctgacagcgggatgggg

SEQ ID NO: 248 - DNA, 23 bp, Homo sapiens
actgacctggcagcgggataggg

SEQ ID NO: 249 - DNA, 23 bp, Homo sapiens
actgatcatacccgcggaggagg

SEQ ID NO: 250 - DNA, 23 bp, Homo sapiens
actgatctggcagtgggatgggg

SEQ ID NO: 251 - DNA, 23 bp, Homo sapiens
actggacatacccgcggaggagg

SEQ ID NO: 252 - DNA, 23 bp, Homo sapiens
actggccatacccgcggaggagg

SEQ ID NO: 253 - DNA, 23 bp, Homo sapiens
actgggctgaccacgggggcggg

SEQ ID NO: 254 - DNA, 23 bp, Homo sapiens
actgggctgaccgcgagggctgg

SEQ ID NO: 255 - DNA, 23 bp, Homo sapiens
actggttatacccgtggaggagg

SEQ ID NO: 256 - DNA, 23 bp, Homo sapiens
actggttatgcccacggaggagg

SEQ ID NO: 257 - DNA, 23 bp, Homo sapiens
acttcatggagtgggaggctggg

SEQ ID NO: 258 - DNA, 23 bp, Homo sapiens
acttctgttcctgatctgagtgg

SEQ ID NO: 259 - DNA, 23 bp, Homo sapiens
acttcttctcccaacttgtgggg

SEQ ID NO: 260 - DNA, 23 bp, Homo sapiens
acttgtggggtccttcttccagg

SEQ ID NO: 261 - DNA, 23 bp, Homo sapiens
actttacctctactcagatcagg

SEQ ID NO: 262 - DNA, 23 bp, Homo sapiens
agaacaaggcctgagaggaaagg

SEQ ID NO: 263 - DNA, 23 bp, Homo sapiens
agaacctagcccggaccccgcgg

SEQ ID NO: 264 - DNA, 23 bp, Homo sapiens
agaacctggccccggccccgcgg

SEQ ID NO: 265 - DNA, 23 bp, Homo sapiens
agaacctggcctcgaccccgcgg

SEQ ID NO: 266 - DNA, 23 bp, Homo sapiens
agaaggaggggccggagtattgg

SEQ ID NO: 267 - DNA, 23 bp, Homo sapiens
agaagtgaaactcagggaagtgg

SEQ ID NO: 268 - DNA, 23 bp, Homo sapiens
agaagtgaaactcttgggagtgg

SEQ ID NO: 269 - DNA, 23 bp, Homo sapiens
agaattctagtccctgaagaggg

SEQ ID NO: 270 - DNA, 23 bp, Homo sapiens
agacactgagagccccgtccggg

SEQ ID NO: 271 - DNA, 23 bp, Homo sapiens
agaccaggcctgccaggggatgg

SEQ ID NO: 272 - DNA, 23 bp, Homo sapiens
agaccctggcccagccctcgcgg

SEQ ID NO: 273 - DNA, 23 bp, Homo sapiens
agaccctggcccggaccccgcgg

SEQ ID NO: 274 - DNA, 23 bp, Homo sapiens
agaccctggcctaggccccgcgg

SEQ ID NO: 275 - DNA, 23 bp, Homo sapiens
agacgaagcggggctctccgcgg

SEQ ID NO: 276 - DNA, 23 bp, Homo sapiens
agacggatgtatcaccttaatgg

SEQ ID NO: 277 - DNA, 23 bp, Homo sapiens
agacggctccgggaaaggaaggg

SEQ ID NO: 278 - DNA, 23 bp, Homo sapiens
agactgaccgaatgaacctgcgg

SEQ ID NO: 279 - DNA, 23 bp, Homo sapiens
agactgaccgagagaaactgcgg

SEQ ID NO: 280 - DNA, 23 bp, Homo sapiens
agactgaccgagtgggcctgcgg

SEQ ID NO: 281 - DNA, 23 bp, Homo sapiens
agactgacggagagagcctgcgg

SEQ ID NO: 282 - DNA, 23 bp, Homo sapiens
agacttaacgagagagcctgcgg

SEQ ID NO: 283 - DNA, 23 bp, Homo sapiens
agacttaccgagagaacctgagg

SEQ ID NO: 284 - DNA, 23 bp, Homo sapiens
agagagtgactctgaggttccgg

SEQ ID NO: 285 - DNA, 23 bp, Homo sapiens
agagcaccgcttcatctcagtgg

SEQ ID NO: 286 - DNA, 23 bp, Homo sapiens
agagcagagatacacatgccagg

SEQ ID NO: 287 - DNA, 23 bp, Homo sapiens
agagcagcaggaggagagttcgg

SEQ ID NO: 288 - DNA, 23 bp, Homo sapiens
agagcagttgagagcctacctgg

SEQ ID NO: 289 - DNA, 23 bp, Homo sapiens
agagccccaaacactgagtgtgg

SEQ ID NO: 290 - DNA, 23 bp, Homo sapiens
agagccccgcttcgtctcagtgg

SEQ ID NO: 291 - DNA, 23 bp, Homo sapiens
agagcgcaggtcgtctttcaggg

SEQ ID NO: 292 - DNA, 23 bp, Homo sapiens
agagctcaggtggaaaaggaggg

SEQ ID NO: 293 - DNA, 23 bp, Homo sapiens
agaggagccgcgggcgccgtggg

SEQ ID NO: 294 - DNA, 23 bp, Homo sapiens
agaggagggaggggccctcccgg

SEQ ID NO: 295 - DNA, 23 bp, Homo sapiens
agaggcccttgaagtcacaaagg

SEQ ID NO: 296 - DNA, 23 bp, Homo sapiens
agagtcccgcttcatctcagtgg

SEQ ID NO: 297 - DNA, 23 bp, Homo sapiens
agagtgggcaggggggtggtggg

SEQ ID NO: 298 - DNA, 23 bp, Homo sapiens
agagtgggcggggggggggtggg

SEQ ID NO: 299 - DNA, 23 bp, Homo sapiens
agagtgtgagaccctggccccgg

SEQ ID NO: 300 - DNA, 23 bp, Homo sapiens
agatcacacggacctggcagcgg

SEQ ID NO: 301 - DNA, 23 bp, Homo sapiens
agatcacactgacctgacagcgg

SEQ ID NO: 302 - DNA, 23 bp, Homo sapiens
agatcacactgacctggtagcgg

SEQ ID NO: 303 - DNA, 23 bp, Homo sapiens
agatcacactgatctggcagtgg

SEQ ID NO: 304 - DNA, 23 bp, Homo sapiens
agatcagtgtgatctccgcaggg

SEQ ID NO: 305 - DNA, 23 bp, Homo sapiens
agatccaccccgaagccgcgggg

SEQ ID NO: 306 - DNA, 23 bp, Homo sapiens
agatccgccccctgaggccgcgg

SEQ ID NO: 307 - DNA, 23 bp, Homo sapiens
agatgaagcgggactctccgcgg

SEQ ID NO: 308 - DNA, 23 bp, Homo sapiens
agatgaagcggtgctctccgcgg

SEQ ID NO: 309 - DNA, 23 bp, Homo sapiens
agatgggataaggagggagatgg

SEQ ID NO: 310 - DNA, 23 bp, Homo sapiens
agatgggttaaggagggagatgg

SEQ ID NO: 311 - DNA, 23 bp, Homo sapiens
agattctcccccagacgccgagg

SEQ ID NO: 312 - DNA, 23 bp, Homo sapiens
agcacagggcccagcacctcagg

SEQ ID NO: 313 - DNA, 23 bp, Homo sapiens
agcagagaacagggcctgagagg

SEQ ID NO: 314 - DNA, 23 bp, Homo sapiens
agcagagaacgaggcctgagagg

SEQ ID NO: 315 - DNA, 23 bp, Homo sapiens
agcagcaggaggagagttcgggg

SEQ ID NO: 316 - DNA, 23 bp, Homo sapiens
agcagcaggatgagggttcaggg

SEQ ID NO: 317 - DNA, 23 bp, Homo sapiens
agcaggaggggccagagtattgg

SEQ ID NO: 318 - DNA, 23 bp, Homo sapiens
agcaggaggggccggagcattgg

SEQ ID NO: 319 - DNA, 23 bp, Homo sapiens
agcaggaggggccggagtactgg

SEQ ID NO: 320 - DNA, 23 bp, Homo sapiens
agcaggaggggccggagtgttgg

SEQ ID NO: 321 - DNA, 23 bp, Homo sapiens
agcaggaggggctggagtattgg

SEQ ID NO: 322 - DNA, 23 bp, Homo sapiens
agcaggaggtgccggaggattgg

SEQ ID NO: 323 - DNA, 23 bp, Homo sapiens
agcatgtacggctgcgacctggg

SEQ ID NO: 324 - DNA, 23 bp, Homo sapiens
agcatgtatggctgcgacgtggg

SEQ ID NO: 325 - DNA, 23 bp, Homo sapiens
agcattcatgagtcgggggaagg

SEQ ID NO: 326 - DNA, 23 bp, Homo sapiens
agccactccacaggtatctgcgg

SEQ ID NO: 327 - DNA, 23 bp, Homo sapiens
agccatggatagagcaggagggg

SEQ ID NO: 328 - DNA, 23 bp, Homo sapiens
agcccatggcccagcacctcagg

SEQ ID NO: 329 - DNA, 23 bp, Homo sapiens
agccccaaacactgagtgtgggg

SEQ ID NO: 330 - DNA, 23 bp, Homo sapiens
agcccctcctgctctatccatgg

SEQ ID NO: 331 - DNA, 23 bp, Homo sapiens
agccgcctcccacttgcgctggg

SEQ ID NO: 332 - DNA, 23 bp, Homo sapiens
agccgcgccgggaggtgggtcgg

SEQ ID NO: 333 - DNA, 23 bp, Homo sapiens
agccgcgccggtaggagggtcgg

SEQ ID NO: 334 - DNA, 23 bp, Homo sapiens
agccgtggatggagcaggagggg

SEQ ID NO: 335 - DNA, 23 bp, Homo sapiens
agcgaccccgcgagtccgagagg

SEQ ID NO: 336 - DNA, 23 bp, Homo sapiens
agcgacgccgcaagtccgagagg

SEQ ID NO: 337 - DNA, 23 bp, Homo sapiens
agcgacgccgcgagtccgagggg

SEQ ID NO: 338 - DNA, 23 bp, Homo sapiens
agcgactccgcgagtccaagagg

SEQ ID NO: 339 - DNA, 23 bp, Homo sapiens
agcgcaagtgggaggcggcccgg

SEQ ID NO: 340 - DNA, 23 bp, Homo sapiens
agcgcgatccgcagttctctcgg

SEQ ID NO: 341 - DNA, 23 bp, Homo sapiens
agcgcgggtaccaggggcagtgg

SEQ ID NO: 342 - DNA, 23 bp, Homo sapiens
agcggcctctgcggagaggaggg

SEQ ID NO: 343 - DNA, 23 bp, Homo sapiens
agcggcgcagggaggagggtcgg

SEQ ID NO: 344 - DNA, 23 bp, Homo sapiens
agcggcgcagggaggtgggtcgg

SEQ ID NO: 345 - DNA, 23 bp, Homo sapiens
agcggtgtagaaatacttcatgg

SEQ ID NO: 346 - DNA, 23 bp, Homo sapiens
agctacgccgcgagtccaagagg

SEQ ID NO: 347 - DNA, 23 bp, Homo sapiens
agctcaggtagggaaggggtggg

SEQ ID NO: 348 - DNA, 23 bp, Homo sapiens
agctgccgcagtggtcgaagtgg

SEQ ID NO: 349 - DNA, 23 bp, Homo sapiens
agcttgtacggctgcgacgtggg

SEQ ID NO: 350 - DNA, 23 bp, Homo sapiens
aggaaaagtcacggtgcccaagg

SEQ ID NO: 351 - DNA, 23 bp, Homo sapiens
aggaaaggtcacggttcccaagg

SEQ ID NO: 352 - DNA, 23 bp, Homo sapiens
aggaacgcagatcctcgttcagg

SEQ ID NO: 353 - DNA, 23 bp, Homo sapiens
aggaagagctcaggtggaaaagg

SEQ ID NO: 354 - DNA, 23 bp, Homo sapiens
aggaagagttctggtagggaagg

SEQ ID NO: 355 - DNA, 23 bp, Homo sapiens
aggacccgggaagccgcgcaggg

SEQ ID NO: 356 - DNA, 23 bp, Homo sapiens
aggacctgcgctcctggacgcgg

SEQ ID NO: 357 - DNA, 23 bp, Homo sapiens
aggacggtgaccccggcccgggg

SEQ ID NO: 358 - DNA, 23 bp, Homo sapiens
aggagacccgggccgtacgtcgg

SEQ ID NO: 359 - DNA, 23 bp, Homo sapiens
aggagcctgggggcgaggagtgg

SEQ ID NO: 360 - DNA, 23 bp, Homo sapiens
aggagcgcaggtcctcgtccagg

SEQ ID NO: 361 - DNA, 23 bp, Homo sapiens
aggagcttaggtcctcgttcagg

SEQ ID NO: 362 - DNA, 23 bp, Homo sapiens
aggaggcgcccgtcgggcccagg

SEQ ID NO: 363 - DNA, 23 bp, Homo sapiens
aggaggcgcccgtcgggccccgg

SEQ ID NO: 364 - DNA, 23 bp, Homo sapiens
aggagggcaggtcctcgttcagg

SEQ ID NO: 365 - DNA, 23 bp, Homo sapiens
aggagtactggttatgcccgcgg

SEQ ID NO: 366 - DNA, 23 bp, Homo sapiens
aggatggagccgcgagccagagg

SEQ ID NO: 367 - DNA, 23 bp, Homo sapiens
aggatgtaaggctgcgacgtggg

SEQ ID NO: 368 - DNA, 23 bp, Homo sapiens
aggatgtacggctgggacctggg

SEQ ID NO: 369 - DNA, 23 bp, Homo sapiens
aggatgtatggttgcgacgtggg

SEQ ID NO: 370 - DNA, 23 bp, Homo sapiens
aggatgtctggctgcgacccggg

SEQ ID NO: 371 - DNA, 23 bp, Homo sapiens
aggcaaactggttatgcccgcgg

SEQ ID NO: 372 - DNA, 23 bp, Homo sapiens
aggcacctgggcctctcccgggg

SEQ ID NO: 373 - DNA, 23 bp, Homo sapiens
aggcagggccatgtgattttagg

SEQ ID NO: 374 - DNA, 23 bp, Homo sapiens
aggcataatgtgaggagataggg

SEQ ID NO: 375 - DNA, 23 bp, Homo sapiens
aggcataatgtgaggagggtggg

SEQ ID NO: 376 - DNA, 23 bp, Homo sapiens
aggcatactgctcatacccgcgg

SEQ ID NO: 377 - DNA, 23 bp, Homo sapiens
aggccaaaaatccccctggttgg

SEQ ID NO: 378 - DNA, 23 bp, Homo sapiens
aggcccaggcgcctttaacccgg

SEQ ID NO: 379 - DNA, 23 bp, Homo sapiens
aggcccttgaagtcacaaagggg

SEQ ID NO: 380 - DNA, 23 bp, Homo sapiens
aggccgcctcccacttgcgctgg

SEQ ID NO: 381 - DNA, 23 bp, Homo sapiens
aggcctcatcccccacggacggg

SEQ ID NO: 382 - DNA, 23 bp, Homo sapiens
aggcctgagaggaaaggtcacgg

SEQ ID NO: 383 - DNA, 23 bp, Homo sapiens
aggcgaactggtggtacccgcgg

SEQ ID NO: 384 - DNA, 23 bp, Homo sapiens
aggcgaactggttatacccgtgg

SEQ ID NO: 385 - DNA, 23 bp, Homo sapiens
aggcgacctgccggtacccgcgg

SEQ ID NO: 386 - DNA, 23 bp, Homo sapiens
aggcggaccggtcatacccgcgg

SEQ ID NO: 387 - DNA, 23 bp, Homo sapiens
aggcggactgatcatacccgcgg

SEQ ID NO: 388 - DNA, 23 bp, Homo sapiens
aggcggactggccatacccgcgg

SEQ ID NO: 389 - DNA, 23 bp, Homo sapiens
aggcgtactggacatacccgcgg

SEQ ID NO: 390 - DNA, 23 bp, Homo sapiens
aggcgtactggttatacccgcgg

SEQ ID NO: 391 - DNA, 23 bp, Homo sapiens
aggcgtagtggtggtacccgcgg

SEQ ID NO: 392 - DNA, 23 bp, Homo sapiens
aggcgtcctggttatgcccgcgg

SEQ ID NO: 393 - DNA, 23 bp, Homo sapiens
aggcgtgctgccggtacccgcgg

SEQ ID NO: 394 - DNA, 23 bp, Homo sapiens
aggctaactggttatgcccacgg

SEQ ID NO: 395 - DNA, 23 bp, Homo sapiens
aggctgaccgagagagcctgcgg

SEQ ID NO: 396 - DNA, 23 bp, Homo sapiens
aggctgcatgtaagtgatggcgg

SEQ ID NO: 397 - DNA, 23 bp, Homo sapiens
aggctgcgtgtaaatgatggcgg

SEQ ID NO: 398 - DNA, 23 bp, Homo sapiens
aggctgcgtgtaagtgatgccgg

SEQ ID NO: 399 - DNA, 23 bp, Homo sapiens
aggctgctgacttttctctcagg

SEQ ID NO: 400 - DNA, 23 bp, Homo sapiens
agggagcctgggggcgaggaggg

SEQ ID NO: 401 - DNA, 23 bp, Homo sapiens
agggaggggccctcccggcgagg

SEQ ID NO: 402 - DNA, 23 bp, Homo sapiens
agggctccccgcggccgggccgg

SEQ ID NO: 403 - DNA, 23 bp, Homo sapiens
aggggagccgcaggcgccgtggg

SEQ ID NO: 404 - DNA, 23 bp, Homo sapiens
aggggccagagtattgggaccgg

SEQ ID NO: 405 - DNA, 23 bp, Homo sapiens
aggggccccgaccctgctgaagg

SEQ ID NO: 406 - DNA, 23 bp, Homo sapiens
aggggccggaatattgggacggg

SEQ ID NO: 407 - DNA, 23 bp, Homo sapiens
aggggccggagcattgggaccgg

SEQ ID NO: 408 - DNA, 23 bp, Homo sapiens
aggggccggagtactgggaccgg

SEQ ID NO: 409 - DNA, 23 bp, Homo sapiens
aggggccggagtattaggaccgg

SEQ ID NO: 410 - DNA, 23 bp, Homo sapiens
aggggccggagtgttgggaccgg

SEQ ID NO: 411 - DNA, 23 bp, Homo sapiens
aggggctctgaccctgataaagg

SEQ ID NO: 412 - DNA, 23 bp, Homo sapiens
aggggctctgaccctgctaaagg

SEQ ID NO: 413 - DNA, 23 bp, Homo sapiens
aggggctggagtattgggaccgg

SEQ ID NO: 414 - DNA, 23 bp, Homo sapiens
agggggaaaggcctgggtaatgg

SEQ ID NO: 415 - DNA, 23 bp, Homo sapiens
aggggggtggtggggcagagggg

SEQ ID NO: 416 - DNA, 23 bp, Homo sapiens
aggggtggggagtggggtctggg

SEQ ID NO: 417 - DNA, 23 bp, Homo sapiens
agggtatgagaccctggccccgg

SEQ ID NO: 418 - DNA, 23 bp, Homo sapiens
agggtgtgagaccctggcctagg

SEQ ID NO: 419 - DNA, 23 bp, Homo sapiens
agggtttttcaagtcacaaaggg

SEQ ID NO: 420 - DNA, 23 bp, Homo sapiens
aggtatctgcggtgccctccagg

SEQ ID NO: 421 - DNA, 23 bp, Homo sapiens
aggtcaaaatccccgcgggttgg

SEQ ID NO: 422 - DNA, 23 bp, Homo sapiens
aggtccgtgtgatctccgcaggg

SEQ ID NO: 423 - DNA, 23 bp, Homo sapiens
aggtcgctgttccctcctcaggg

SEQ ID NO: 424 - DNA, 23 bp, Homo sapiens
aggtgccggaggattgggaccgg

SEQ ID NO: 425 - DNA, 23 bp, Homo sapiens
aggtgggtgagctcccccatggg

SEQ ID NO: 426 - DNA, 23 bp, Homo sapiens
agtacccgcgcagggtccccagg

SEQ ID NO: 427 - DNA, 23 bp, Homo sapiens
agtactggttatgcccgcggagg

SEQ ID NO: 428 - DNA, 23 bp, Homo sapiens
agtagccaagcaggttccgcagg

SEQ ID NO: 429 - DNA, 23 bp, Homo sapiens
agtagccgcgcaggatccgcagg

SEQ ID NO: 430 - DNA, 23 bp, Homo sapiens
agtagccgcgcaggtttcgcagg

SEQ ID NO: 431 - DNA, 23 bp, Homo sapiens
agtagccgcgcagttgccgcagg

SEQ ID NO: 432 - DNA, 23 bp, Homo sapiens
agtagccgtgcagggtccccagg

SEQ ID NO: 433 - DNA, 23 bp, Homo sapiens
agtagcggagcgcgatcctcagg

SEQ ID NO: 434 - DNA, 23 bp, Homo sapiens
agtattgggaccaggagacgcgg

SEQ ID NO: 435 - DNA, 23 bp, Homo sapiens
agtcatatgcgtcttgggggggg

SEQ ID NO: 436 - DNA, 23 bp, Homo sapiens
agtccctataatactgatcaggg

SEQ ID NO: 437 - DNA, 23 bp, Homo sapiens
agtccgagaaggggagccgcggg

SEQ ID NO: 438 - DNA, 23 bp, Homo sapiens
agtgccatgttcagcacgagggg

SEQ ID NO: 439 - DNA, 23 bp, Homo sapiens
agtggccgcgcaggttccgcagg

SEQ ID NO: 440 - DNA, 23 bp, Homo sapiens
agtggccgcgcagtttccgcagg

SEQ ID NO: 441 - DNA, 23 bp, Homo sapiens
agtggctccgcagatacctgggg

SEQ ID NO: 442 - DNA, 23 bp, Homo sapiens
agtgggagactccgcccatgagg

SEQ ID NO: 443 - DNA, 23 bp, Homo sapiens
agtggtcgaagtggtcaaagggg

SEQ ID NO: 444 - DNA, 23 bp, Homo sapiens
agtgtgacccctcactgtgatgg

SEQ ID NO: 445 - DNA, 23 bp, Homo sapiens
agttgaggtcaaaatccccgcgg

SEQ ID NO: 446 - DNA, 23 bp, Homo sapiens
agttggggaatctccaaggctgg

SEQ ID NO: 447 - DNA, 23 bp, Homo sapiens
atacttctggaaattctttttgg

SEQ ID NO: 448 - DNA, 23 bp, Homo sapiens
atagcccacggtgatgaagcggg

SEQ ID NO: 449 - DNA, 23 bp, Homo sapiens
atatcggacccggagactgtggg

SEQ ID NO: 450 - DNA, 23 bp, Homo sapiens
atcctctggatgtgagaccctgg

SEQ ID NO: 451 - DNA, 23 bp, Homo sapiens
atctcggaccctgagactcgggg

SEQ ID NO: 452 - DNA, 23 bp, Homo sapiens
atctcggacctagagactcgagg

SEQ ID NO: 453 - DNA, 23 bp, Homo sapiens
atctgcggtgccctccaggtagg

SEQ ID NO: 454 - DNA, 23 bp, Homo sapiens
atgaacctgcggaaactgcgcgg

SEQ ID NO: 455 - DNA, 23 bp, Homo sapiens
atgaggcctgcgccccgggccgg

SEQ ID NO: 456 - DNA, 23 bp, Homo sapiens
atgaggggcttcggtaaggaggg

SEQ ID NO: 457 - DNA, 23 bp, Homo sapiens
atggatagagcaggaggggctgg

SEQ ID NO: 458 - DNA, 23 bp, Homo sapiens
atggatagagcaggaggtgccgg

SEQ ID NO: 459 - DNA, 23 bp, Homo sapiens
atggccatcctcggcgtctgggg

SEQ ID NO: 460 - DNA, 23 bp, Homo sapiens
atggctcccatctcagggtgagg

SEQ ID NO: 461 - DNA, 23 bp, Homo sapiens
atgggaggcggcccgtgtggcgg

SEQ ID NO: 462 - DNA, 23 bp, Homo sapiens
atgggataaggagggagatgggg

SEQ ID NO: 463 - DNA, 23 bp, Homo sapiens
atgggttaaggagggagatgggg

SEQ ID NO: 464 - DNA, 23 bp, Homo sapiens
atggtgtgagaacctggccccgg

SEQ ID NO: 465 - DNA, 23 bp, Homo sapiens
atgtaatcccttgccgtcgtagg

SEQ ID NO: 466 - DNA, 23 bp, Homo sapiens
atgtacagcatgaggggcttcgg

SEQ ID NO: 467 - DNA, 23 bp, Homo sapiens
atgtatcaccgtggtggttgtgg

SEQ ID NO: 468 - DNA, 23 bp, Homo sapiens
atgtatcaccttaatggttgtgg

SEQ ID NO: 469 - DNA, 23 bp, Homo sapiens
atgtgtaggaggaagagttctgg

SEQ ID NO: 470 - DNA, 23 bp, Homo sapiens
attaagggatgacatctctgagg

SEQ ID NO: 471 - DNA, 23 bp, Homo sapiens
attaagggatggcgtctctgagg

SEQ ID NO: 472 - DNA, 23 bp, Homo sapiens
attcatatcactcacagtgaggg

SEQ ID NO: 473 - DNA, 23 bp, Homo sapiens
attcatatctgtcacagtgaggg

SEQ ID NO: 474 - DNA, 23 bp, Homo sapiens
attccagcatcatgagtcagggg

SEQ ID NO: 475 - DNA, 23 bp, Homo sapiens
attccagcattcatgagtcgggg

SEQ ID NO: 476 - DNA, 23 bp, Homo sapiens
attgtcctagacagcagaggggg

SEQ ID NO: 477 - DNA, 23 bp, Homo sapiens
atttcgacaccgccacgtcccgg

SEQ ID NO: 478 - DNA, 23 bp, Homo sapiens
atttcgacaccgccgtgtcctgg

SEQ ID NO: 479 - DNA, 23 bp, Homo sapiens
atttctacacatccgtgtcccgg

SEQ ID NO: 480 - DNA, 23 bp, Homo sapiens
atttctacaccgccatgacccgg

SEQ ID NO: 481 - DNA, 23 bp, Homo sapiens
atttctacaccgccgtgtccggg

SEQ ID NO: 482 - DNA, 23 bp, Homo sapiens
atttctacaccgctatgtcccgg

SEQ ID NO: 483 - DNA, 23 bp, Homo sapiens
atttctacatctccgtgtcccgg

SEQ ID NO: 484 - DNA, 23 bp, Homo sapiens
atttcttcacatccgtgtcctgg

SEQ ID NO: 485 - DNA, 23 bp, Homo sapiens
atttcttcacattcgtgtcccgg

SEQ ID NO: 486 - DNA, 23 bp, Homo sapiens
atttctttacatccgtgtcccgg

SEQ ID NO: 487 - DNA, 23 bp, Homo sapiens
caaaaatccccctggttggtcgg

SEQ ID NO: 488 - DNA, 23 bp, Homo sapiens
caaacccctcaccctgagatggg

SEQ ID NO: 489 - DNA, 23 bp, Homo sapiens
caaactggttatgcccgcggagg

SEQ ID NO: 490 - DNA, 23 bp, Homo sapiens
caaatgggaggcggcccgtgtgg

SEQ ID NO: 491 - DNA, 23 bp, Homo sapiens
caaatgtcctgtgagggcactgg

SEQ ID NO: 492 - DNA, 23 bp, Homo sapiens
caacggagagcctacctggaggg

SEQ ID NO: 493 - DNA, 23 bp, Homo sapiens
caagagcccgcaggagacgtggg

SEQ ID NO: 494 - DNA, 23 bp, Homo sapiens
caagctcagtgtcctgaatttgg

SEQ ID NO: 495 - DNA, 23 bp, Homo sapiens
caagctgggtgtcctgagtttgg

SEQ ID NO: 496 - DNA, 23 bp, Homo sapiens
caaggcacagactgaccgagtgg

SEQ ID NO: 497 - DNA, 23 bp, Homo sapiens
caagtccgagaggggagccccgg

SEQ ID NO: 498 - DNA, 23 bp, Homo sapiens
caagtgccatgttcagcacgagg

SEQ ID NO: 499 - DNA, 23 bp, Homo sapiens
caagtgggaggcagcccgtgagg

SEQ ID NO: 500 - DNA, 23 bp, Homo sapiens
caagtgggaggcggcccgggtgg

SEQ ID NO: 501 - DNA, 23 bp, Homo sapiens
caagtgggaggcggcccgtatgg

SEQ ID NO: 502 - DNA, 23 bp, Homo sapiens
caagtgggaggcggccggtgagg

SEQ ID NO: 503 - DNA, 23 bp, Homo sapiens
caagtgggaggcggcctgtgagg

SEQ ID NO: 504 - DNA, 23 bp, Homo sapiens
caagtgggaggcggctcgtgagg

SEQ ID NO: 505 - DNA, 23 bp, Homo sapiens
caagttggaggcggcccgtgggg

SEQ ID NO: 506 - DNA, 23 bp, Homo sapiens
cacaagaaagggagacaaatggg

SEQ ID NO: 507 - DNA, 23 bp, Homo sapiens
cacaatatccaaaggacctcagg

SEQ ID NO: 508 - DNA, 23 bp, Homo sapiens
cacacacaggccctccaggtagg

SEQ ID NO: 509 - DNA, 23 bp, Homo sapiens
cacacacgtgccctccaggtagg

SEQ ID NO: 510 - DNA, 23 bp, Homo sapiens
cacacagatctgcaaggccaagg

SEQ ID NO: 511 - DNA, 23 bp, Homo sapiens
cacaccatccagaggatgtacgg

SEQ ID NO: 512 - DNA, 23 bp, Homo sapiens
cacacccgccagaggatgtacgg

SEQ ID NO: 513 - DNA, 23 bp, Homo sapiens
cacaccctccagacgatgtacgg

SEQ ID NO: 514 - DNA, 23 bp, Homo sapiens
cacaccctccagagcatgtatgg

SEQ ID NO: 515 - DNA, 23 bp, Homo sapiens
cacaccctccagagcttgtacgg

SEQ ID NO: 516 - DNA, 23 bp, Homo sapiens
cacaccctccagatgatgtatgg

SEQ ID NO: 517 - DNA, 23 bp, Homo sapiens
cacaccctccagcggatgtatgg

SEQ ID NO: 518 - DNA, 23 bp, Homo sapiens
cacaccgtccagaggatgtttgg

SEQ ID NO: 519 - DNA, 23 bp, Homo sapiens
cacacctccgtgtcccggcctgg

SEQ ID NO: 520 - DNA, 23 bp, Homo sapiens
cacacgggccgcctcccacttgg

SEQ ID NO: 521 - DNA, 23 bp, Homo sapiens
cacactctccagagcatgtacgg

SEQ ID NO: 522 - DNA, 23 bp, Homo sapiens
cacactgaccgagtggacctggg

SEQ ID NO: 523 - DNA, 23 bp, Homo sapiens
cacacttggcagacgatgtacgg

SEQ ID NO: 524 - DNA, 23 bp, Homo sapiens
cacagcatccagaggatgtatgg

SEQ ID NO: 525 - DNA, 23 bp, Homo sapiens
cacagcctcccacttctggaagg

SEQ ID NO: 526 - DNA, 23 bp, Homo sapiens
cacaggtaccaggggccacgggg

SEQ ID NO: 527 - DNA, 23 bp, Homo sapiens
cacatcatccagaggatgtaagg

SEQ ID NO: 528 - DNA, 23 bp, Homo sapiens
cacatcatccggaggatgtatgg

SEQ ID NO: 529 - DNA, 23 bp, Homo sapiens
cacatgccaggtacagcatgagg

SEQ ID NO: 530 - DNA, 23 bp, Homo sapiens
caccagcggacgcaggcacctgg

SEQ ID NO: 531 - DNA, 23 bp, Homo sapiens
cacccaataggagtgagaactgg

SEQ ID NO: 532 - DNA, 23 bp, Homo sapiens
cacccaattggagtgagaactgg

SEQ ID NO: 533 - DNA, 23 bp, Homo sapiens
cacccagcacaagttggaggcgg

SEQ ID NO: 534 - DNA, 23 bp, Homo sapiens
cacccagcccaagtgggaggcgg

SEQ ID NO: 535 - DNA, 23 bp, Homo sapiens
cacccagcccaagttggaggcgg

SEQ ID NO: 536 - DNA, 23 bp, Homo sapiens
cacccagcgcaaatgggaggcgg

SEQ ID NO: 537 - DNA, 23 bp, Homo sapiens
cacccagcgtaagtgggaggcgg

SEQ ID NO: 538 - DNA, 23 bp, Homo sapiens
cacccgatgggagtgagaactgg

SEQ ID NO: 539 - DNA, 23 bp, Homo sapiens
cacccgcccaggtctcggtcagg

SEQ ID NO: 540 - DNA, 23 bp, Homo sapiens
caccctgagatgggataaggagg

SEQ ID NO: 541 - DNA, 23 bp, Homo sapiens
caccctgagatgggttaaggagg

SEQ ID NO: 542 - DNA, 23 bp, Homo sapiens
caccctgaggtgctgggccatgg

SEQ ID NO: 543 - DNA, 23 bp, Homo sapiens
caccgagcgcaagtgggaggcgg

SEQ ID NO: 544 - DNA, 23 bp, Homo sapiens
caccgcagatacctgtggagtgg

SEQ ID NO: 545 - DNA, 23 bp, Homo sapiens
caccggccggggtcactcaccgg

SEQ ID NO: 546 - DNA, 23 bp, Homo sapiens
caccgtagctgtggtcgctgtgg

SEQ ID NO: 547 - DNA, 23 bp, Homo sapiens
caccgtggatagagcaggagagg

SEQ ID NO: 548 - DNA, 23 bp, Homo sapiens
caccgtggtggttgtggtgttgg

SEQ ID NO: 549 - DNA, 23 bp, Homo sapiens
cacctcatggagtgggagcctgg

SEQ ID NO: 550 - DNA, 23 bp, Homo sapiens
cacctcccggcgcggctccccgg

SEQ ID NO: 551 - DNA, 23 bp, Homo sapiens
cacctccctgcgccgctccccgg

SEQ ID NO: 552 - DNA, 23 bp, Homo sapiens
caccttaatggttgtggtgttgg

SEQ ID NO: 553 - DNA, 23 bp, Homo sapiens
caccttgatattatggtgttggg

SEQ ID NO: 554 - DNA, 23 bp, Homo sapiens
caccttggtggttgtggcgttgg

SEQ ID NO: 555 - DNA, 23 bp, Homo sapiens
cacgaacgtgccctccaggtagg

SEQ ID NO: 556 - DNA, 23 bp, Homo sapiens
cacgaggaagggaggaaaatggg

SEQ ID NO: 557 - DNA, 23 bp, Homo sapiens
cacgagtaccaggggccacgggg

SEQ ID NO: 558 - DNA, 23 bp, Homo sapiens
cacgatggggacagtggactggg

SEQ ID NO: 559 - DNA, 23 bp, Homo sapiens
cacgcacagaccctccaggtagg

SEQ ID NO: 560 - DNA, 23 bp, Homo sapiens
cacgcacaggccctcccggtagg

SEQ ID NO: 561 - DNA, 23 bp, Homo sapiens
cacgcacgtgcccaccaggtagg

SEQ ID NO: 562 - DNA, 23 bp, Homo sapiens
cacgcacgtgccctccaggtggg

SEQ ID NO: 563 - DNA, 23 bp, Homo sapiens
cacgcacgtgtcctccaggtagg

SEQ ID NO: 564 - DNA, 23 bp, Homo sapiens
cacgcacgttccctccaggtagg

SEQ ID NO: 565 - DNA, 23 bp, Homo sapiens
cacgcactcgccctccaggcagg

SEQ ID NO: 566 - DNA, 23 bp, Homo sapiens
cacgcacttgccctccaggtagg

SEQ ID NO: 567 - DNA, 23 bp, Homo sapiens
cacgcgcgtgccctccaggtagg

SEQ ID NO: 568 - DNA, 23 bp, Homo sapiens
cacgcgggtaccaggggcagtgg

SEQ ID NO: 569 - DNA, 23 bp, Homo sapiens
cacggacctggcagcgggatggg

SEQ ID NO: 570 - DNA, 23 bp, Homo sapiens
cacgggtaccagggaccacgggg

SEQ ID NO: 571 - DNA, 23 bp, Homo sapiens
cacgtacgtgccctccaggtagg

SEQ ID NO: 572 - DNA, 23 bp, Homo sapiens
cacgtcccggcccggccgcgggg

SEQ ID NO: 573 - DNA, 23 bp, Homo sapiens
cacgtgccatgtgcagcatgagg

SEQ ID NO: 574 - DNA, 23 bp, Homo sapiens
cactcacgtgccctccaggtagg

SEQ ID NO: 575 - DNA, 23 bp, Homo sapiens
cactcagcgcaagttggaggcgg

SEQ ID NO: 576 - DNA, 23 bp, Homo sapiens
cactcggtcagtctgtgcctggg

SEQ ID NO: 577 - DNA, 23 bp, Homo sapiens
cactcggtcagtctgtgccttgg

SEQ ID NO: 578 - DNA, 23 bp, Homo sapiens
cactcggtcagtgtgtgactggg

SEQ ID NO: 579 - DNA, 23 bp, Homo sapiens
cactctgaggtgctgggccctgg

SEQ ID NO: 580 - DNA, 23 bp, Homo sapiens
cactgacctgacagcgggatggg

SEQ ID NO: 581 - DNA, 23 bp, Homo sapiens
cactgacctggcagcgggatagg

SEQ ID NO: 582 - DNA, 23 bp, Homo sapiens
cactgatctggcagtgggatggg

SEQ ID NO: 583 - DNA, 23 bp, Homo sapiens
cactggtaccaggggccacgggg

SEQ ID NO: 584 - DNA, 23 bp, Homo sapiens
cacttcttctcccaacttgtggg

SEQ ID NO: 585 - DNA, 23 bp, Homo sapiens
cagacacctgaagaatgggaagg

SEQ ID NO: 586 - DNA, 23 bp, Homo sapiens
cagacacctggagaacaggaagg

SEQ ID NO: 587 - DNA, 23 bp, Homo sapiens
cagactgaccgagagaactgcgg

SEQ ID NO: 588 - DNA, 23 bp, Homo sapiens
cagagcgaggacggtgaccccgg

SEQ ID NO: 589 - DNA, 23 bp, Homo sapiens
cagatacctgaagaaagggaagg

SEQ ID NO: 590 - DNA, 23 bp, Homo sapiens
cagatacctggagaaagggaagg

SEQ ID NO: 591 - DNA, 23 bp, Homo sapiens
cagatacctggagaaccggaagg

SEQ ID NO: 592 - DNA, 23 bp, Homo sapiens
cagatacctggagaacggtaagg

SEQ ID NO: 593 - DNA, 23 bp, Homo sapiens
cagatacctggagaatgggaagg

SEQ ID NO: 594 - DNA, 23 bp, Homo sapiens
cagatatctggagaacgggaagg

SEQ ID NO: 595 - DNA, 23 bp, Homo sapiens
cagatcagtgtgatctccgcagg

SEQ ID NO: 596 - DNA, 23 bp, Homo sapiens
cagcatcatgagtcaggggaagg

SEQ ID NO: 597 - DNA, 23 bp, Homo sapiens
cagcatgaggggcttcggtaagg

SEQ ID NO: 598 - DNA, 23 bp, Homo sapiens
cagcccggacgcaggcacctggg

SEQ ID NO: 599 - DNA, 23 bp, Homo sapiens
cagcctggacacagacacctggg

SEQ ID NO: 600 - DNA, 23 bp, Homo sapiens
cagcgacgccgcgagtccgaggg

SEQ ID NO: 601 - DNA, 23 bp, Homo sapiens
cagcgcaagtgggaggcggccgg

SEQ ID NO: 602 - DNA, 23 bp, Homo sapiens
cagcggagaacctacctggaggg

SEQ ID NO: 603 - DNA, 23 bp, Homo sapiens
cagctaagagcctacctggaggg

SEQ ID NO: 604 - DNA, 23 bp, Homo sapiens
cagctgagagcctaccgggaggg

SEQ ID NO: 605 - DNA, 23 bp, Homo sapiens
cagctgagagcctacctggatgg

SEQ ID NO: 606 - DNA, 23 bp, Homo sapiens
cagctgagagcctacctggtggg

SEQ ID NO: 607 - DNA, 23 bp, Homo sapiens
cagctgagagcctgcctggaggg

SEQ ID NO: 608 - DNA, 23 bp, Homo sapiens
caggacccgggaagccgcgcagg

SEQ ID NO: 609 - DNA, 23 bp, Homo sapiens
caggccgggacacggaggtgtgg

SEQ ID NO: 610 - DNA, 23 bp, Homo sapiens
caggcctcatcccccacggacgg

SEQ ID NO: 611 - DNA, 23 bp, Homo sapiens
cagggggcggatctcggacccgg

SEQ ID NO: 612 - DNA, 23 bp, Homo sapiens
caggggggtggtggggcagaggg

SEQ ID NO: 613 - DNA, 23 bp, Homo sapiens
cagggtctcacacccgccagagg

SEQ ID NO: 614 - DNA, 23 bp, Homo sapiens
cagggtctcacaccctccagcgg

SEQ ID NO: 615 - DNA, 23 bp, Homo sapiens
cagggtctcacaccgtccagagg

SEQ ID NO: 616 - DNA, 23 bp, Homo sapiens
cagggtctcacatcatccggagg

SEQ ID NO: 617 - DNA, 23 bp, Homo sapiens
cagggtctcataccctccagagg

SEQ ID NO: 618 - DNA, 23 bp, Homo sapiens
cagggtttttcaagtcacaaagg

SEQ ID NO: 619 - DNA, 23 bp, Homo sapiens
caggtaggctctcagctgctcgg

SEQ ID NO: 620 - DNA, 23 bp, Homo sapiens
caggtccgtgtgatctccgcagg

SEQ ID NO: 621 - DNA, 23 bp, Homo sapiens
caggttctcacagcatccagagg

SEQ ID NO: 622 - DNA, 23 bp, Homo sapiens
cagtccactgtccccatcgtggg

SEQ ID NO: 623 - DNA, 23 bp, Homo sapiens
cagtccctataatactgatcagg

SEQ ID NO: 624 - DNA, 23 bp, Homo sapiens
cagtgcagagcctacctggaggg

SEQ ID NO: 625 - DNA, 23 bp, Homo sapiens
cagtggacacaagggtgggctgg

SEQ ID NO: 626 - DNA, 23 bp, Homo sapiens
cagtggagagcccacctggaggg

SEQ ID NO: 627 - DNA, 23 bp, Homo sapiens
cagtggagagtctacctggaggg

SEQ ID NO: 628 - DNA, 23 bp, Homo sapiens
cagtggtcgaagtggtcaaaggg

SEQ ID NO: 629 - DNA, 23 bp, Homo sapiens
cagttcgcctacgacggcaaggg

SEQ ID NO: 630 - DNA, 23 bp, Homo sapiens
cagttgaaagcctacctggaggg

SEQ ID NO: 631 - DNA, 23 bp, Homo sapiens
cataaccaggacgcctacgacgg

SEQ ID NO: 632 - DNA, 23 bp, Homo sapiens
cataaccagtactcctacgacgg

SEQ ID NO: 633 - DNA, 23 bp, Homo sapiens
cataaccagtttgcctacgacgg

SEQ ID NO: 634 - DNA, 23 bp, Homo sapiens
catacccgcggaggaggcgccgg

SEQ ID NO: 635 - DNA, 23 bp, Homo sapiens
cataccctccagaggatgtacgg

SEQ ID NO: 636 - DNA, 23 bp, Homo sapiens
catactgctcatacccgcggagg

SEQ ID NO: 637 - DNA, 23 bp, Homo sapiens
catagcccacggtgatgaagcgg

SEQ ID NO: 638 - DNA, 23 bp, Homo sapiens
catccagcgcaagtgggaggcgg

SEQ ID NO: 639 - DNA, 23 bp, Homo sapiens
catcgggagaatctgagtcccgg

SEQ ID NO: 640 - DNA, 23 bp, Homo sapiens
catgaccagtccgcctaggacgg

SEQ ID NO: 641 - DNA, 23 bp, Homo sapiens
catgaccagtccgcctgcgacgg

SEQ ID NO: 642 - DNA, 23 bp, Homo sapiens
catgacccggcccggccgcgggg

SEQ ID NO: 643 - DNA, 23 bp, Homo sapiens
catgaggggcttcggtaaggagg

SEQ ID NO: 644 - DNA, 23 bp, Homo sapiens
catgcacgtgccctccaggtagg

SEQ ID NO: 645 - DNA, 23 bp, Homo sapiens
catgccaggtacagcatgagggg

SEQ ID NO: 646 - DNA, 23 bp, Homo sapiens
catggcccagcacctcagggtgg

SEQ ID NO: 647 - DNA, 23 bp, Homo sapiens
catgtcccggcccggccgtgggg

SEQ ID NO: 648 - DNA, 23 bp, Homo sapiens
catgtcccggcccggctgcgggg

SEQ ID NO: 649 - DNA, 23 bp, Homo sapiens
catgtttcctgatcccgcctggg

SEQ ID NO: 650 - DNA, 23 bp, Homo sapiens
cattactggaaacttctctgagg

SEQ ID NO: 651 - DNA, 23 bp, Homo sapiens
catttgtctccctttcttgtggg

SEQ ID NO: 652 - DNA, 23 bp, Homo sapiens
cattttcctcccttcctcgtggg

SEQ ID NO: 653 - DNA, 23 bp, Homo sapiens
ccaaacaccagcctggacgcagg

SEQ ID NO: 654 - DNA, 23 bp, Homo sapiens
ccaaacccctcaccctgagatgg

SEQ ID NO: 655 - DNA, 23 bp, Homo sapiens
ccaaccccgacgtacggcccggg

SEQ ID NO: 656 - DNA, 23 bp, Homo sapiens
ccaatgggagtgggaattggggg

SEQ ID NO: 657 - DNA, 23 bp, Homo sapiens
ccacaagaaagggagacaaatgg

SEQ ID NO: 658 - DNA, 23 bp, Homo sapiens
ccacagctacggtgaccacaagg

SEQ ID NO: 659 - DNA, 23 bp, Homo sapiens
ccaccacagcctcccacttctgg

SEQ ID NO: 660 - DNA, 23 bp, Homo sapiens
ccacctggagggcacgtgcgtgg

SEQ ID NO: 661 - DNA, 23 bp, Homo sapiens
ccacgaggaagggaggaaaatgg

SEQ ID NO: 662 - DNA, 23 bp, Homo sapiens
ccacgatggggacagtggactgg

SEQ ID NO: 663 - DNA, 23 bp, Homo sapiens
ccacgcacgtgccctccaggtgg

SEQ ID NO: 664 - DNA, 23 bp, Homo sapiens
ccacgccgcgagtccgaggacgg

SEQ ID NO: 665 - DNA, 23 bp, Homo sapiens
ccacggaggaggcgcccgtccgg

SEQ ID NO: 666 - DNA, 23 bp, Homo sapiens
ccacgtcccggcccggccgcggg

SEQ ID NO: 667 - DNA, 23 bp, Homo sapiens
ccactacgcctacgacggcaagg

SEQ ID NO: 668 - DNA, 23 bp, Homo sapiens
ccactcggtcagtgtgtgactgg

SEQ ID NO: 669 - DNA, 23 bp, Homo sapiens
ccactgccccctagagcagcagg

SEQ ID NO: 670 - DNA, 23 bp, Homo sapiens
ccactgctccgcctcatgggcgg

SEQ ID NO: 671 - DNA, 23 bp, Homo sapiens
ccactggggtttcaagccccagg

SEQ ID NO: 672 - DNA, 23 bp, Homo sapiens
ccagaagtgggaggctgtggtgg

SEQ ID NO: 673 - DNA, 23 bp, Homo sapiens
ccagacaccagcccggacgcagg

SEQ ID NO: 674 - DNA, 23 bp, Homo sapiens
ccagcccggacgcaggcacctgg

SEQ ID NO: 675 - DNA, 23 bp, Homo sapiens
ccagccgtacatcctctggaggg

SEQ ID NO: 676 - DNA, 23 bp, Homo sapiens
ccagcctggacacagacacctgg

SEQ ID NO: 677 - DNA, 23 bp, Homo sapiens
ccaggacacggagctcgtggagg

SEQ ID NO: 678 - DNA, 23 bp, Homo sapiens
ccaggagacgcggaatgtgaagg

SEQ ID NO: 679 - DNA, 23 bp, Homo sapiens
ccaggcacagactgaccgagagg

SEQ ID NO: 680 - DNA, 23 bp, Homo sapiens
ccaggtgcctgcgtccgggctgg

SEQ ID NO: 681 - DNA, 23 bp, Homo sapiens
ccaggtgtctgtgtccaggctgg

SEQ ID NO: 682 - DNA, 23 bp, Homo sapiens
ccagtacgcctacgacggcaggg

SEQ ID NO: 683 - DNA, 23 bp, Homo sapiens
ccagtactcctacgacggcaagg

SEQ ID NO: 684 - DNA, 23 bp, Homo sapiens
ccagtcacacactgaccgagtgg

SEQ ID NO: 685 - DNA, 23 bp, Homo sapiens
ccagtccactgtccccatcgtgg

SEQ ID NO: 686 - DNA, 23 bp, Homo sapiens
ccagtccgcctaagacggcaagg

SEQ ID NO: 687 - DNA, 23 bp, Homo sapiens
ccagtccgcctaggacggcaagg

SEQ ID NO: 688 - DNA, 23 bp, Homo sapiens
ccagtccgcctgcgacggcaagg

SEQ ID NO: 689 - DNA, 23 bp, Homo sapiens
ccagttcgcctacgatggcaagg

SEQ ID NO: 690 - DNA, 23 bp, Homo sapiens
ccagtttgcctacgacggcaagg

SEQ ID NO: 691 - DNA, 23 bp, Homo sapiens
ccatcccccacgtacggccgggg

SEQ ID NO: 692 - DNA, 23 bp, Homo sapiens
ccatctcagggtgaggggtttgg

SEQ ID NO: 693 - DNA, 23 bp, Homo sapiens
ccatctcctatagatcgcccggg

SEQ ID NO: 694 - DNA, 23 bp, Homo sapiens
ccatgacccggcccggccgcggg

SEQ ID NO: 695 - DNA, 23 bp, Homo sapiens
ccatgtcccggcccggccgtggg

SEQ ID NO: 696 - DNA, 23 bp, Homo sapiens
ccatgtcccggcccggctgcggg

SEQ ID NO: 697 - DNA, 23 bp, Homo sapiens
ccatttgtctccctttcttgtgg

SEQ ID NO: 698 - DNA, 23 bp, Homo sapiens
ccattttcctcccttcctcgtgg

SEQ ID NO: 699 - DNA, 23 bp, Homo sapiens
cccaaccccgacgtacggcccgg

SEQ ID NO: 700 - DNA, 23 bp, Homo sapiens
cccacggccgggccgggacatgg

SEQ ID NO: 701 - DNA, 23 bp, Homo sapiens
cccagccgtacatcctctggagg

SEQ ID NO: 702 - DNA, 23 bp, Homo sapiens
cccatcccccacgtacggccggg

SEQ ID NO: 703 - DNA, 23 bp, Homo sapiens
cccatctcctatagatcgcccgg

SEQ ID NO: 704 - DNA, 23 bp, Homo sapiens
cccattttccattcaagggaggg

SEQ ID NO: 705 - DNA, 23 bp, Homo sapiens
ccccaacaccacaaccaccacgg

SEQ ID NO: 706 - DNA, 23 bp, Homo sapiens
ccccaacaccacaaccattaagg

SEQ ID NO: 707 - DNA, 23 bp, Homo sapiens
ccccaacgccacaaccaccaagg

SEQ ID NO: 708 - DNA, 23 bp, Homo sapiens
ccccaggctcccactccttgagg

SEQ ID NO: 709 - DNA, 23 bp, Homo sapiens
ccccaggctcccacttcatgagg

SEQ ID NO: 710 - DNA, 23 bp, Homo sapiens
ccccaggctccctctccatgagg

SEQ ID NO: 711 - DNA, 23 bp, Homo sapiens
ccccaggctcctactccatgagg

SEQ ID NO: 712 - DNA, 23 bp, Homo sapiens
ccccaggcttccactccatgagg

SEQ ID NO: 713 - DNA, 23 bp, Homo sapiens
ccccaggttcccactccatgagg

SEQ ID NO: 714 - DNA, 23 bp, Homo sapiens
ccccatcccccacgtacggccgg

SEQ ID NO: 715 - DNA, 23 bp, Homo sapiens
cccccaattcccactcccattgg

SEQ ID NO: 716 - DNA, 23 bp, Homo sapiens
ccccctagagcagcaggaggagg

SEQ ID NO: 717 - DNA, 23 bp, Homo sapiens
ccccctggttggtcggggccggg

SEQ ID NO: 718 - DNA, 23 bp, Homo sapiens
ccccggccgtacgtgggggatgg

SEQ ID NO: 719 - DNA, 23 bp, Homo sapiens
ccccggcggtccaggagcgcagg

SEQ ID NO: 720 - DNA, 23 bp, Homo sapiens
ccccgggccggggtcactcacgg

SEQ ID NO: 721 - DNA, 23 bp, Homo sapiens
cccctagagcagcaggaggaggg

SEQ ID NO: 722 - DNA, 23 bp, Homo sapiens
cccctccctcctctccgcagagg

SEQ ID NO: 723 - DNA, 23 bp, Homo sapiens
cccctcgctcctctcagcagagg

SEQ ID NO: 724 - DNA, 23 bp, Homo sapiens
cccctcgctcctctccatagagg

SEQ ID NO: 725 - DNA, 23 bp, Homo sapiens
cccgaccggcgcctcctccgcgg

SEQ ID NO: 726 - DNA, 23 bp, Homo sapiens
cccgacgggcccctcctccgcgg

SEQ ID NO: 727 - DNA, 23 bp, Homo sapiens
cccgacgggcgcctcctccacgg

SEQ ID NO: 728 - DNA, 23 bp, Homo sapiens
cccgacgggcgtctcctccgcgg

SEQ ID NO: 729 - DNA, 23 bp, Homo sapiens
cccgcagccgggccgggacatgg

SEQ ID NO: 730 - DNA, 23 bp, Homo sapiens
cccgcggaggagacgcccgtcgg

SEQ ID NO: 731 - DNA, 23 bp, Homo sapiens
cccgcggaggaggcgcccgccgg

SEQ ID NO: 732 - DNA, 23 bp, Homo sapiens
cccgcggaggaggcgcccgtagg

SEQ ID NO: 733 - DNA, 23 bp, Homo sapiens
cccgcggaggaggcgccggtcgg

SEQ ID NO: 734 - DNA, 23 bp, Homo sapiens
cccgcggaggaggggcccgtcgg

SEQ ID NO: 735 - DNA, 23 bp, Homo sapiens
cccgcggccaggccgggacacgg

SEQ ID NO: 736 - DNA, 23 bp, Homo sapiens
cccgcggccgggccgggacgtgg

SEQ ID NO: 737 - DNA, 23 bp, Homo sapiens
cccgcggccgggccgggtcatgg

SEQ ID NO: 738 - DNA, 23 bp, Homo sapiens
cccgctgccgggccgggacacgg

SEQ ID NO: 739 - DNA, 23 bp, Homo sapiens
cccggccccgaccaaccaggggg

SEQ ID NO: 740 - DNA, 23 bp, Homo sapiens
cccggccggtggcgcaggtcagg

SEQ ID NO: 741 - DNA, 23 bp, Homo sapiens
cccggccgtacgtgggggatggg

SEQ ID NO: 742 - DNA, 23 bp, Homo sapiens
cccggcgggcgcctcctccgcgg

SEQ ID NO: 743 - DNA, 23 bp, Homo sapiens
cccgggccgtacgtcggggttgg

SEQ ID NO: 744 - DNA, 23 bp, Homo sapiens
cccgggcgatctataggagatgg

SEQ ID NO: 745 - DNA, 23 bp, Homo sapiens
cccgggtcgccccgagtctcagg

SEQ ID NO: 746 - DNA, 23 bp, Homo sapiens
cccggtcccaatactccgtccgg

SEQ ID NO: 747 - DNA, 23 bp, Homo sapiens
cccggtttcgttttcagtttagg

SEQ ID NO: 748 - DNA, 23 bp, Homo sapiens
cccgtggaggaggcgcccgtcgg

SEQ ID NO: 749 - DNA, 23 bp, Homo sapiens
ccctacgggcgcctcctccgcgg

SEQ ID NO: 750 - DNA, 23 bp, Homo sapiens
ccctccagaggatgtacggctgg

SEQ ID NO: 751 - DNA, 23 bp, Homo sapiens
ccctccccaaccccgacgtacgg

SEQ ID NO: 752 - DNA, 23 bp, Homo sapiens
ccctcccttgaatggaaaatggg

SEQ ID NO: 753 - DNA, 23 bp, Homo sapiens
ccctcctcctgctgctctagggg

SEQ ID NO: 754 - DNA, 23 bp, Homo sapiens
ccctcctgaggtctgtcgtcagg

SEQ ID NO: 755 - DNA, 23 bp, Homo sapiens
ccctgacgacagacctcaggagg

SEQ ID NO: 756 - DNA, 23 bp, Homo sapiens
ccctgagactcggggcgacccgg

SEQ ID NO: 757 - DNA, 23 bp, Homo sapiens
ccctgcagcgcgcgggtaccagg

SEQ ID NO: 758 - DNA, 23 bp, Homo sapiens
ccctgccgtcgtaggcgtactgg

SEQ ID NO: 759 - DNA, 23 bp, Homo sapiens
ccctggtacccgcgcgctgcagg

SEQ ID NO: 760 - DNA, 23 bp, Homo sapiens
cccttgaagtcacaaaggggagg

SEQ ID NO: 761 - DNA, 23 bp, Homo sapiens
ccgaccggcgcctcctccgcggg

SEQ ID NO: 762 - DNA, 23 bp, Homo sapiens
ccgacgggcccctcctccgcggg

SEQ ID NO: 763 - DNA, 23 bp, Homo sapiens
ccgacgggcgcctcctccacggg

SEQ ID NO: 764 - DNA, 23 bp, Homo sapiens
ccgacgggcgtctcctccgcggg

SEQ ID NO: 765 - DNA, 23 bp, Homo sapiens
ccgcccatgaggcggagcagtgg

SEQ ID NO: 766 - DNA, 23 bp, Homo sapiens
ccgccgcgatccaggagctcagg

SEQ ID NO: 767 - DNA, 23 bp, Homo sapiens
ccgccgcggtcaaagagcgcagg

SEQ ID NO: 768 - DNA, 23 bp, Homo sapiens
ccgccgcggtccaggagcttagg

SEQ ID NO: 769 - DNA, 23 bp, Homo sapiens
ccgccgcggtccgggagctcagg

SEQ ID NO: 770 - DNA, 23 bp, Homo sapiens
ccgccgcggtctaagagcgcagg

SEQ ID NO: 771 - DNA, 23 bp, Homo sapiens
ccgcggaggagacgcccgtcggg

SEQ ID NO: 772 - DNA, 23 bp, Homo sapiens
ccgcggaggaggcgcccatccgg

SEQ ID NO: 773 - DNA, 23 bp, Homo sapiens
ccgcggaggaggcgcccgccggg

SEQ ID NO: 774 - DNA, 23 bp, Homo sapiens
ccgcggaggaggcgcccgtaggg

SEQ ID NO: 775 - DNA, 23 bp, Homo sapiens
ccgcggaggaggcgccggtcggg

SEQ ID NO: 776 - DNA, 23 bp, Homo sapiens
ccgcggaggaggggcccgtcggg

SEQ ID NO: 777 - DNA, 23 bp, Homo sapiens
ccgcggcaatccaggagcgcagg

SEQ ID NO: 778 - DNA, 23 bp, Homo sapiens
ccgcggcggtccaggagggcagg

SEQ ID NO: 779 - DNA, 23 bp, Homo sapiens
ccgcggtgtccgccgcggtccgg

SEQ ID NO: 780 - DNA, 23 bp, Homo sapiens
ccgcggtgtccgccgcgtccagg

SEQ ID NO: 781 - DNA, 23 bp, Homo sapiens
ccggaacacacagatctgcaagg

SEQ ID NO: 782 - DNA, 23 bp, Homo sapiens
ccggaccgcggcggacaccgcgg

SEQ ID NO: 783 - DNA, 23 bp, Homo sapiens
ccggacggagtattgggaccggg

SEQ ID NO: 784 - DNA, 23 bp, Homo sapiens
ccggacgggcgcctcctccgtgg

SEQ ID NO: 785 - DNA, 23 bp, Homo sapiens
ccggagactcggggcgaccccgg

SEQ ID NO: 786 - DNA, 23 bp, Homo sapiens
ccggagatctacaggcgatcagg

SEQ ID NO: 787 - DNA, 23 bp, Homo sapiens
ccggatgggcgcctcctccgcgg

SEQ ID NO: 788 - DNA, 23 bp, Homo sapiens
ccggccgtacgtgggggatgggg

SEQ ID NO: 789 - DNA, 23 bp, Homo sapiens
ccggcgggcgcctcctccgcggg

SEQ ID NO: 790 - DNA, 23 bp, Homo sapiens
ccgggagccatggatagagcagg

SEQ ID NO: 791 - DNA, 23 bp, Homo sapiens
ccgggccgtacgtcggggttggg

SEQ ID NO: 792 - DNA, 23 bp, Homo sapiens
ccgggcgatctataggagatggg

SEQ ID NO: 793 - DNA, 23 bp, Homo sapiens
ccggggtcgccccgagtctccgg

SEQ ID NO: 794 - DNA, 23 bp, Homo sapiens
ccgggtcgccccgagtctcaggg

SEQ ID NO: 795 - DNA, 23 bp, Homo sapiens
ccgggtctcacaccctccagagg

SEQ ID NO: 796 - DNA, 23 bp, Homo sapiens
ccgggtctcctcgagtctctagg

SEQ ID NO: 797 - DNA, 23 bp, Homo sapiens
ccggtccgcctacgacggcaagg

SEQ ID NO: 798 - DNA, 23 bp, Homo sapiens
ccgtacgtcggggttggggaggg

SEQ ID NO: 799 - DNA, 23 bp, Homo sapiens
ccgtcctcggactcgcggcgtgg

SEQ ID NO: 800 - DNA, 23 bp, Homo sapiens
ccgtgagtgaccccggcccgggg

SEQ ID NO: 801 - DNA, 23 bp, Homo sapiens
ccgtggaggaggcgcccgtcggg

SEQ ID NO: 802 - DNA, 23 bp, Homo sapiens
ccgtggtggttgtggtgttgggg

SEQ ID NO: 803 - DNA, 23 bp, Homo sapiens
ccgtgtcccggcccggcagcggg

SEQ ID NO: 804 - DNA, 23 bp, Homo sapiens
ccgtgtcccggcctggccgcggg

SEQ ID NO: 805 - DNA, 23 bp, Homo sapiens
cctaaactgaaaacgaaaccggg

SEQ ID NO: 806 - DNA, 23 bp, Homo sapiens
cctaagctcctggaccgcggcgg

SEQ ID NO: 807 - DNA, 23 bp, Homo sapiens
cctacgggcgcctcctccgcggg

SEQ ID NO: 808 - DNA, 23 bp, Homo sapiens
cctagagactcgaggagacccgg

SEQ ID NO: 809 - DNA, 23 bp, Homo sapiens
cctcaaggagtgggagcctgggg

SEQ ID NO: 810 - DNA, 23 bp, Homo sapiens
cctcaccctgagatgggataagg

SEQ ID NO: 811 - DNA, 23 bp, Homo sapiens
cctcaccctgagatgggttaagg

SEQ ID NO: 812 - DNA, 23 bp, Homo sapiens
cctcatgaagtgggagcctgggg

SEQ ID NO: 813 - DNA, 23 bp, Homo sapiens
cctcatggagagggagcctgggg

SEQ ID NO: 814 - DNA, 23 bp, Homo sapiens
cctcatggagtaggagcctgggg

SEQ ID NO: 815 - DNA, 23 bp, Homo sapiens
cctcatggagtggaagcctgggg

SEQ ID NO: 816 - DNA, 23 bp, Homo sapiens
cctcatggagtgggaacctgggg

SEQ ID NO: 817 - DNA, 23 bp, Homo sapiens
cctccacgagctccgtgtcctgg

SEQ ID NO: 818 - DNA, 23 bp, Homo sapiens
cctccagaggatgtacggctggg

SEQ ID NO: 819 - DNA, 23 bp, Homo sapiens
cctcccctttgtgacttcaaggg

SEQ ID NO: 820 - DNA, 23 bp, Homo sapiens
cctcctccgcgggcataaccagg

SEQ ID NO: 821 - DNA, 23 bp, Homo sapiens
cctcctcctgctgctctaggggg

SEQ ID NO: 822 - DNA, 23 bp, Homo sapiens
cctcctgaggtctgtcgtcaggg

SEQ ID NO: 823 - DNA, 23 bp, Homo sapiens
cctcgaccgcagagagccccagg

SEQ ID NO: 824 - DNA, 23 bp, Homo sapiens
cctctatggagaggagcgagggg

SEQ ID NO: 825 - DNA, 23 bp, Homo sapiens
cctctcggtcagtctgtgcctgg

SEQ ID NO: 826 - DNA, 23 bp, Homo sapiens
cctctctggagacctttatcagg

SEQ ID NO: 827 - DNA, 23 bp, Homo sapiens
cctctgcggagaggagggagggg

SEQ ID NO: 828 - DNA, 23 bp, Homo sapiens
cctctgctgagaggagcgagggg

SEQ ID NO: 829 - DNA, 23 bp, Homo sapiens
cctctggagggtgtgagacccgg

SEQ ID NO: 830 - DNA, 23 bp, Homo sapiens
cctgacctgcgccaccggccggg

SEQ ID NO: 831 - DNA, 23 bp, Homo sapiens
cctgacgacagacctcaggaggg

SEQ ID NO: 832 - DNA, 23 bp, Homo sapiens
cctgagactcggggcgacccggg

SEQ ID NO: 833 - DNA, 23 bp, Homo sapiens
cctgagctcccggaccgcggcgg

SEQ ID NO: 834 - DNA, 23 bp, Homo sapiens
cctgagctcctggatcgcggcgg

SEQ ID NO: 835 - DNA, 23 bp, Homo sapiens
cctgataaaggtctccagagagg

SEQ ID NO: 836 - DNA, 23 bp, Homo sapiens
cctgatcgcctgtagatctccgg

SEQ ID NO: 837 - DNA, 23 bp, Homo sapiens
cctgcagacacgtaatgtgaagg

SEQ ID NO: 838 - DNA, 23 bp, Homo sapiens
cctgcagcgcgcgggtaccaggg

SEQ ID NO: 839 - DNA, 23 bp, Homo sapiens
cctgccctcctggaccgccgcgg

SEQ ID NO: 840 - DNA, 23 bp, Homo sapiens
cctgcgctcctggaccgccgggg

SEQ ID NO: 841 - DNA, 23 bp, Homo sapiens
cctgcgctcctggattgccgcgg

SEQ ID NO: 842 - DNA, 23 bp, Homo sapiens
cctgcgctcttagaccgcggcgg

SEQ ID NO: 843 - DNA, 23 bp, Homo sapiens
cctgcgctctttgaccgcggcgg

SEQ ID NO: 844 - DNA, 23 bp, Homo sapiens
cctgcgtccaggctggtgtttgg

SEQ ID NO: 845 - DNA, 23 bp, Homo sapiens
cctgcgtccgggctggtgtctgg

SEQ ID NO: 846 - DNA, 23 bp, Homo sapiens
cctgctctatccatggctcccgg

SEQ ID NO: 847 - DNA, 23 bp, Homo sapiens
cctgctgctctagggggcagtgg

SEQ ID NO: 848 - DNA, 23 bp, Homo sapiens
cctggacgcggcggacaccgcgg

SEQ ID NO: 849 - DNA, 23 bp, Homo sapiens
cctggggctctctgcggtcgagg

SEQ ID NO: 850 - DNA, 23 bp, Homo sapiens
cctggggcttgaaaccccagtgg

SEQ ID NO: 851 - DNA, 23 bp, Homo sapiens
cctggtacccgcgcgctgcaggg

SEQ ID NO: 852 - DNA, 23 bp, Homo sapiens
cctggttatgcccgcggaggagg

SEQ ID NO: 853 - DNA, 23 bp, Homo sapiens
ccttaacccatctcagggtgagg

SEQ ID NO: 854 - DNA, 23 bp, Homo sapiens
ccttaatggttgtggtgttgggg

SEQ ID NO: 855 - DNA, 23 bp, Homo sapiens
ccttatcccatctcagggtgagg

SEQ ID NO: 856 - DNA, 23 bp, Homo sapiens
ccttcacattacgtgtctgcagg

SEQ ID NO: 857 - DNA, 23 bp, Homo sapiens
ccttcacattccgcgtctcctgg

SEQ ID NO: 858 - DNA, 23 bp, Homo sapiens
ccttgcagatctgtgtgttccgg

SEQ ID NO: 859 - DNA, 23 bp, Homo sapiens
ccttgccatcgtaggcgaactgg

SEQ ID NO: 860 - DNA, 23 bp, Homo sapiens
ccttgccgtcctaggcggactgg

SEQ ID NO: 861 - DNA, 23 bp, Homo sapiens
ccttgccgtcgcaggcggactgg

SEQ ID NO: 862 - DNA, 23 bp, Homo sapiens
ccttgccgtcgtaggagtactgg

SEQ ID NO: 863 - DNA, 23 bp, Homo sapiens
ccttgccgtcgtaggcaaactgg

SEQ ID NO: 864 - DNA, 23 bp, Homo sapiens
ccttgccgtcgtaggcggaccgg

SEQ ID NO: 865 - DNA, 23 bp, Homo sapiens
ccttgccgtcgtaggcgtagtgg

SEQ ID NO: 866 - DNA, 23 bp, Homo sapiens
ccttgccgtcttaggcggactgg

SEQ ID NO: 867 - DNA, 23 bp, Homo sapiens
ccttggtggttgtggcgttgggg

SEQ ID NO: 868 - DNA, 23 bp, Homo sapiens
ccttgtggtcaccgtagctgtgg

SEQ ID NO: 869 - DNA, 23 bp, Homo sapiens
cgaaaccgggtaaaggtgactgg

SEQ ID NO: 870 - DNA, 23 bp, Homo sapiens
cgaactggtggtacccgcggagg

SEQ ID NO: 871 - DNA, 23 bp, Homo sapiens
cgaactggttatacccgtggagg

SEQ ID NO: 872 - DNA, 23 bp, Homo sapiens
cgacacgcagttcgtgcggttgg

SEQ ID NO: 873 - DNA, 23 bp, Homo sapiens
cgaccaaccagggggatttttgg

SEQ ID NO: 874 - DNA, 23 bp, Homo sapiens
cgaccccgcgagtccgagagggg

SEQ ID NO: 875 - DNA, 23 bp, Homo sapiens
cgacccgcactcacccgcccagg

SEQ ID NO: 876 - DNA, 23 bp, Homo sapiens
cgacctgccggtacccgcggagg

SEQ ID NO: 877 - DNA, 23 bp, Homo sapiens
cgacctgcgctcttggaccgcgg

SEQ ID NO: 878 - DNA, 23 bp, Homo sapiens
cgacgccgcaagtccgagagggg

SEQ ID NO: 879 - DNA, 23 bp, Homo sapiens
cgacgccgcgagccaaaggatgg

SEQ ID NO: 880 - DNA, 23 bp, Homo sapiens
cgacgccgcgagtccgagaaggg

SEQ ID NO: 881 - DNA, 23 bp, Homo sapiens
cgacgccgcgagtccgagggggg

SEQ ID NO: 882 - DNA, 23 bp, Homo sapiens
cgacgctgcgagtccgaggacgg

SEQ ID NO: 883 - DNA, 23 bp, Homo sapiens
cgactccgcgagtccaagagggg

SEQ ID NO: 884 - DNA, 23 bp, Homo sapiens
cgagagaggagccgcgggcgcgg

SEQ ID NO: 885 - DNA, 23 bp, Homo sapiens
cgagatccgccccgaggccgcgg

SEQ ID NO: 886 - DNA, 23 bp, Homo sapiens
cgagcagctgagagcctacctgg

SEQ ID NO: 887 - DNA, 23 bp, Homo sapiens
cgagccaaaggatggagccgcgg

SEQ ID NO: 888 - DNA, 23 bp, Homo sapiens
cgaggacggtgaccccggcccgg

SEQ ID NO: 889 - DNA, 23 bp, Homo sapiens
cgagtccgaggacggagccctgg

SEQ ID NO: 890 - DNA, 23 bp, Homo sapiens
cgagtccgaggatggagccccgg

SEQ ID NO: 891 - DNA, 23 bp, Homo sapiens
cgagtccgaggatggcgccctgg

SEQ ID NO: 892 - DNA, 23 bp, Homo sapiens
cgagtccgaggggggagccgcgg

SEQ ID NO: 893 - DNA, 23 bp, Homo sapiens
cgatatccgccccgaagccgcgg

SEQ ID NO: 894 - DNA, 23 bp, Homo sapiens
cgatctataggagatggggaagg

SEQ ID NO: 895 - DNA, 23 bp, Homo sapiens
cgatgaagcagggctccccgcgg

SEQ ID NO: 896 - DNA, 23 bp, Homo sapiens
cgatgaagcggagctccccgcgg

SEQ ID NO: 897 - DNA, 23 bp, Homo sapiens
cgatgaagcggggctccccacgg

SEQ ID NO: 898 - DNA, 23 bp, Homo sapiens
cgatgaagcggggctcctcgcgg

SEQ ID NO: 899 - DNA, 23 bp, Homo sapiens
cgatgaagcggggttccccgcgg

SEQ ID NO: 900 - DNA, 23 bp, Homo sapiens
cgatgtatggctgcgacatgggg

SEQ ID NO: 901 - DNA, 23 bp, Homo sapiens
cgcaagttggaggcggcccgtgg

SEQ ID NO: 902 - DNA, 23 bp, Homo sapiens
cgcacaggtaccaggggccacgg

SEQ ID NO: 903 - DNA, 23 bp, Homo sapiens
cgcacgagtaccaggggccacgg

SEQ ID NO: 904 - DNA, 23 bp, Homo sapiens
cgcacgggccgcctccaacttgg

SEQ ID NO: 905 - DNA, 23 bp, Homo sapiens
cgcacgggtaccagggaccacgg

SEQ ID NO: 906 - DNA, 23 bp, Homo sapiens
cgcactggtaccaggggccacgg

SEQ ID NO: 907 - DNA, 23 bp, Homo sapiens
cgcagccatacatcatctggagg

SEQ ID NO: 908 - DNA, 23 bp, Homo sapiens
cgcagccatacatccgctggagg

SEQ ID NO: 909 - DNA, 23 bp, Homo sapiens
cgcagccatacatgctctggagg

SEQ ID NO: 910 - DNA, 23 bp, Homo sapiens
cgcagccgtacaagctctggagg

SEQ ID NO: 911 - DNA, 23 bp, Homo sapiens
cgcagccgtacatcctctggcgg

SEQ ID NO: 912 - DNA, 23 bp, Homo sapiens
cgcagccgtacatcgtctggagg

SEQ ID NO: 913 - DNA, 23 bp, Homo sapiens
cgcaggagacgttggacaggagg

SEQ ID NO: 914 - DNA, 23 bp, Homo sapiens
cgccctccctctggtcttgaggg

SEQ ID NO: 915 - DNA, 23 bp, Homo sapiens
cgccctggatagagcaggagggg

SEQ ID NO: 916 - DNA, 23 bp, Homo sapiens
cgccgggaggtgggtcgggcggg

SEQ ID NO: 917 - DNA, 23 bp, Homo sapiens
cgccggtaggagggtcgggcggg

SEQ ID NO: 918 - DNA, 23 bp, Homo sapiens
cgccgtgggtggagaaggagggg

SEQ ID NO: 919 - DNA, 23 bp, Homo sapiens
cgccgtgtccgcggcaatccagg

SEQ ID NO: 920 - DNA, 23 bp, Homo sapiens
cgcctgtagatctccggggctgg

SEQ ID NO: 921 - DNA, 23 bp, Homo sapiens
cgcgcccgcggctcctctctcgg

SEQ ID NO: 922 - DNA, 23 bp, Homo sapiens
cgcgcgggtaccaagggcagtgg

SEQ ID NO: 923 - DNA, 23 bp, Homo sapiens
cgcgcgggtaccggggcagtggg

SEQ ID NO: 924 - DNA, 23 bp, Homo sapiens
cgcgctgcagcgtctccttccgg

SEQ ID NO: 925 - DNA, 23 bp, Homo sapiens
cgcggcctcggggcggatctcgg

SEQ ID NO: 926 - DNA, 23 bp, Homo sapiens
cgcggcttcggggcggatatcgg

SEQ ID NO: 927 - DNA, 23 bp, Homo sapiens
cgcgggtaccaagggcagtgggg

SEQ ID NO: 928 - DNA, 23 bp, Homo sapiens
cgcgggtaccaggggccacaggg

SEQ ID NO: 929 - DNA, 23 bp, Homo sapiens
cgcggtatccgcggcggtccagg

SEQ ID NO: 930 - DNA, 23 bp, Homo sapiens
cgcggtcagccccgtccccccgg

SEQ ID NO: 931 - DNA, 23 bp, Homo sapiens
cgcggtggatagagcaggagggg

SEQ ID NO: 932 - DNA, 23 bp, Homo sapiens
cgcggtgtccgcagcggtccagg

SEQ ID NO: 933 - DNA, 23 bp, Homo sapiens
cgcggtgtccgccgcgatccagg

SEQ ID NO: 934 - DNA, 23 bp, Homo sapiens
cgcggtgtccgccgcggtccggg

SEQ ID NO: 935 - DNA, 23 bp, Homo sapiens
cgctctggttgtagccgcgcagg

SEQ ID NO: 936 - DNA, 23 bp, Homo sapiens
cgctgcaacgcgcgggtaccagg

SEQ ID NO: 937 - DNA, 23 bp, Homo sapiens
cgctgcagagcgcgggtaccagg

SEQ ID NO: 938 - DNA, 23 bp, Homo sapiens
cgctgcagcacgcgggtaccagg

SEQ ID NO: 939 - DNA, 23 bp, Homo sapiens
cgctgcagcgcacaggtaccagg

SEQ ID NO: 940 - DNA, 23 bp, Homo sapiens
cgctgcagcgcacgagtaccagg

SEQ ID NO: 941 - DNA, 23 bp, Homo sapiens
cgctgcagcgcactggtaccagg

SEQ ID NO: 942 - DNA, 23 bp, Homo sapiens
cgctgcagcgcgcgggtaccggg

SEQ ID NO: 943 - DNA, 23 bp, Homo sapiens
cgctggagggtgtgagaccctgg

SEQ ID NO: 944 - DNA, 23 bp, Homo sapiens
cgctgtgtccccggcggtccagg

SEQ ID NO: 945 - DNA, 23 bp, Homo sapiens
cgcttgtaaggtgagattctggg

SEQ ID NO: 946 - DNA, 23 bp, Homo sapiens
cggaccggtcatacccgcggagg

SEQ ID NO: 947 - DNA, 23 bp, Homo sapiens
cggacgggcgcctcctccgtggg

SEQ ID NO: 948 - DNA, 23 bp, Homo sapiens
cggactgatcatacccgcggagg

SEQ ID NO: 949 - DNA, 23 bp, Homo sapiens
cggactggccatacccgcggagg

SEQ ID NO: 950 - DNA, 23 bp, Homo sapiens
cggagatctacaggcgatcaggg

SEQ ID NO: 951 - DNA, 23 bp, Homo sapiens
cggagcagctgagagcctaccgg

SEQ ID NO: 952 - DNA, 23 bp, Homo sapiens
cggagtctcccacttgcgctggg

SEQ ID NO: 953 - DNA, 23 bp, Homo sapiens
cggatgggcgcctcctccgcggg

SEQ ID NO: 954 - DNA, 23 bp, Homo sapiens
cggatgtatggctgcgacctggg

SEQ ID NO: 955 - DNA, 23 bp, Homo sapiens
cggcaaggattacatcgccctgg

SEQ ID NO: 956 - DNA, 23 bp, Homo sapiens
cggccatcctcggcgtctggggg

SEQ ID NO: 957 - DNA, 23 bp, Homo sapiens
cggcccctcctgctctatccagg

SEQ ID NO: 958 - DNA, 23 bp, Homo sapiens
cggcccgtccgtggggaatgagg

SEQ ID NO: 959 - DNA, 23 bp, Homo sapiens
cggcccgtcgggcggagcagcgg

SEQ ID NO: 960 - DNA, 23 bp, Homo sapiens
cggcccgtgaggcggagcaacgg

SEQ ID NO: 961 - DNA, 23 bp, Homo sapiens
cggccgcctcccacttgcgctgg

SEQ ID NO: 962 - DNA, 23 bp, Homo sapiens
cggccggtgaggcggagcagcgg

SEQ ID NO: 963 - DNA, 23 bp, Homo sapiens
cggcctcagggggcggatctcgg

SEQ ID NO: 964 - DNA, 23 bp, Homo sapiens
cggcctgtgaggcggagcagcgg

SEQ ID NO: 965 - DNA, 23 bp, Homo sapiens
cggctactacaacgagagcgagg

SEQ ID NO: 966 - DNA, 23 bp, Homo sapiens
cggctactataaccagagcgagg

SEQ ID NO: 967 - DNA, 23 bp, Homo sapiens
cggctactgcaaccagagcgagg

SEQ ID NO: 968 - DNA, 23 bp, Homo sapiens
cggctagtacaaccagagcgagg

SEQ ID NO: 969 - DNA, 23 bp, Homo sapiens
cggctccatcctttggctcgcgg

SEQ ID NO: 970 - DNA, 23 bp, Homo sapiens
cggctcccccctcggactcgcgg

SEQ ID NO: 971 - DNA, 23 bp, Homo sapiens
cggctcgtgaggcggagcagcgg

SEQ ID NO: 972 - DNA, 23 bp, Homo sapiens
cggctgcgacctgggcccgacgg

SEQ ID NO: 973 - DNA, 23 bp, Homo sapiens
cgggaaaggaagggaagatgagg

SEQ ID NO: 974 - DNA, 23 bp, Homo sapiens
cgggaagccgcgcagggaggagg

SEQ ID NO: 975 - DNA, 23 bp, Homo sapiens
cgggactcagattctcccgatgg

SEQ ID NO: 976 - DNA, 23 bp, Homo sapiens
cgggagaatctgagtcccggtgg

SEQ ID NO: 977 - DNA, 23 bp, Homo sapiens
cgggcatgaccagtccgcctagg

SEQ ID NO: 978 - DNA, 23 bp, Homo sapiens
cgggccgtacgtcggggttgggg

SEQ ID NO: 979 - DNA, 23 bp, Homo sapiens
cgggcgatctataggagatgggg

SEQ ID NO: 980 - DNA, 23 bp, Homo sapiens
cgggcgccgtgggtggaggaggg

SEQ ID NO: 981 - DNA, 23 bp, Homo sapiens
cggggagccgcgccgggaggtgg

SEQ ID NO: 982 - DNA, 23 bp, Homo sapiens
cggggagccgcgccggtaggagg

SEQ ID NO: 983 - DNA, 23 bp, Homo sapiens
cggggagcggcgcagggaggagg

SEQ ID NO: 984 - DNA, 23 bp, Homo sapiens
cggggagcggcgcagggaggtgg

SEQ ID NO: 985 - DNA, 23 bp, Homo sapiens
cggggcgccatgacggccatcgg

SEQ ID NO: 986 - DNA, 23 bp, Homo sapiens
cggggcggggccggggggacggg

SEQ ID NO: 987 - DNA, 23 bp, Homo sapiens
cggggcggggcggggccgggggg

SEQ ID NO: 988 - DNA, 23 bp, Homo sapiens
cggggctcgggggacggggctgg

SEQ ID NO: 989 - DNA, 23 bp, Homo sapiens
cggggctcgggggagctgggcgg

SEQ ID NO: 990 - DNA, 23 bp, Homo sapiens
cggggctgaccgcggggcctagg

SEQ ID NO: 991 - DNA, 23 bp, Homo sapiens
cggggctggccgcggggccgggg

SEQ ID NO: 992 - DNA, 23 bp, Homo sapiens
cggggctggggcggggttcgggg

SEQ ID NO: 993 - DNA, 23 bp, Homo sapiens
cgggggacggggctggccgcggg

SEQ ID NO: 994 - DNA, 23 bp, Homo sapiens
cgggggactgggctgaccacggg

SEQ ID NO: 995 - DNA, 23 bp, Homo sapiens
cgggggagctgggcggggctcgg

SEQ ID NO: 996 - DNA, 23 bp, Homo sapiens
cgggggctgggctgaccgcgggg

SEQ ID NO: 997 - DNA, 23 bp, Homo sapiens
cggggtcacagtggacacaaggg

SEQ ID NO: 998 - DNA, 23 bp, Homo sapiens
cggggtcaccgtcctcgctctgg

SEQ ID NO: 999 - DNA, 23 bp, Homo sapiens
cggggtcgccccgagtctccggg

SEQ ID NO: 1000 - DNA, 23 bp, Homo sapiens
cgggtactacaaccagagcgagg

SEQ ID NO: 1001 - DNA, 23 bp, Homo sapiens
cgggtcccgcggcctcggggcgg

SEQ ID NO: 1002 - DNA, 23 bp, Homo sapiens
cgggtgagtgcgggtcggcaggg

SEQ ID NO: 1003 - DNA, 23 bp, Homo sapiens
cggtgaccacaaggacagccagg

SEQ ID NO: 1004 - DNA, 23 bp, Homo sapiens
cggtgagtgaccccggccggtgg

SEQ ID NO: 1005 - DNA, 23 bp, Homo sapiens
cggtgcccaaggctgctgcaggg

SEQ ID NO: 1006 - DNA, 23 bp, Homo sapiens
cgtaacccactgagatgaagcgg

SEQ ID NO: 1007 - DNA, 23 bp, Homo sapiens
cgtacgtcggggttggggagggg

SEQ ID NO: 1008 - DNA, 23 bp, Homo sapiens
cgtactggacatacccgcggagg

SEQ ID NO: 1009 - DNA, 23 bp, Homo sapiens
cgtactggttatacccgcggagg

SEQ ID NO: 1010 - DNA, 23 bp, Homo sapiens
cgtagcccacagcgatgaagcgg

SEQ ID NO: 1011 - DNA, 23 bp, Homo sapiens
cgtagcccacggtaatgaagcgg

SEQ ID NO: 1012 - DNA, 23 bp, Homo sapiens
cgtagcccactgagacgaagcgg

SEQ ID NO: 1013 - DNA, 23 bp, Homo sapiens
cgtagcgcactgagatgaagcgg

SEQ ID NO: 1014 - DNA, 23 bp, Homo sapiens
cgtagtggtggtacccgcggagg

SEQ ID NO: 1015 - DNA, 23 bp, Homo sapiens
cgtcatggagtgggagcctgggg

SEQ ID NO: 1016 - DNA, 23 bp, Homo sapiens
cgtcctggttatgcccgcggagg

SEQ ID NO: 1017 - DNA, 23 bp, Homo sapiens
cgtcgcaaccatacatcctctgg

SEQ ID NO: 1018 - DNA, 23 bp, Homo sapiens
cgtcgcagccatacatgctctgg

SEQ ID NO: 1019 - DNA, 23 bp, Homo sapiens
cgtcgcagccgtacaagctctgg

SEQ ID NO: 1020 - DNA, 23 bp, Homo sapiens
cgtcgcagccgtacatcgtctgg

SEQ ID NO: 1021 - DNA, 23 bp, Homo sapiens
cgtcgcagccttacatcctctgg

SEQ ID NO: 1022 - DNA, 23 bp, Homo sapiens
cgtcttggggggggtctgtcagg

SEQ ID NO: 1023 - DNA, 23 bp, Homo sapiens
cgtgccatgtgcagcatgagggg

SEQ ID NO: 1024 - DNA, 23 bp, Homo sapiens
cgtgctgccggtacccgcggagg

SEQ ID NO: 1025 - DNA, 23 bp, Homo sapiens
cgtggagaccaggcctgccaggg

SEQ ID NO: 1026 - DNA, 23 bp, Homo sapiens
cgtggaggccaggcctgcagggg

SEQ ID NO: 1027 - DNA, 23 bp, Homo sapiens
cgtgtcccggcccggcagcgggg

SEQ ID NO: 1028 - DNA, 23 bp, Homo sapiens
cgtgtcccggcccggccgcgagg

SEQ ID NO: 1029 - DNA, 23 bp, Homo sapiens
cgtgtcccggcctggccgcgggg

SEQ ID NO: 1030 - DNA, 23 bp, Homo sapiens
cgtgtccgcggcggtccaggagg

SEQ ID NO: 1031 - DNA, 23 bp, Homo sapiens
cgtgtcgtccacatagcccacgg

SEQ ID NO: 1032 - DNA, 23 bp, Homo sapiens
cgtgtcgtccatgtagcccacgg

SEQ ID NO: 1033 - DNA, 23 bp, Homo sapiens
cgttggacaggaggaattatggg

SEQ ID NO: 1034 - DNA, 23 bp, Homo sapiens
ctaactggttatgcccacggagg

SEQ ID NO: 1035 - DNA, 23 bp, Homo sapiens
ctaagccgcggtgtccgccgcgg

SEQ ID NO: 1036 - DNA, 23 bp, Homo sapiens
ctaagctgccatgtccgccgcgg

SEQ ID NO: 1037 - DNA, 23 bp, Homo sapiens
ctaccgggagggcctgtgcgtgg

SEQ ID NO: 1038 - DNA, 23 bp, Homo sapiens
ctacctggaggacacgtgcgtgg

SEQ ID NO: 1039 - DNA, 23 bp, Homo sapiens
ctacctggagggaacgtgcgtgg

SEQ ID NO: 1040 - DNA, 23 bp, Homo sapiens
ctacctggagggcaagtgcgtgg

SEQ ID NO: 1041 - DNA, 23 bp, Homo sapiens
ctacctggagggcacgcgcgtgg

SEQ ID NO: 1042 - DNA, 23 bp, Homo sapiens
ctacctggagggcacgtacgtgg

SEQ ID NO: 1043 - DNA, 23 bp, Homo sapiens
ctacctggagggcacgtgagtgg

SEQ ID NO: 1044 - DNA, 23 bp, Homo sapiens
ctacctggagggcacgtgcatgg

SEQ ID NO: 1045 - DNA, 23 bp, Homo sapiens
ctacctggagggcacgtgtgtgg

SEQ ID NO: 1046 - DNA, 23 bp, Homo sapiens
ctacctggagggcacgttcgtgg

SEQ ID NO: 1047 - DNA, 23 bp, Homo sapiens
ctacctggagggcctgtgcgagg

SEQ ID NO: 1048 - DNA, 23 bp, Homo sapiens
ctacctggagggcctgtgtgtgg

SEQ ID NO: 1049 - DNA, 23 bp, Homo sapiens
ctacctggagggcgagttcgtgg

SEQ ID NO: 1050 - DNA, 23 bp, Homo sapiens
ctacctggagggtctgtgcgtgg

SEQ ID NO: 1051 - DNA, 23 bp, Homo sapiens
ctacctggtgggcacgtgcgtgg

SEQ ID NO: 1052 - DNA, 23 bp, Homo sapiens
ctacgccgcgagtccaagagggg

SEQ ID NO: 1053 - DNA, 23 bp, Homo sapiens
ctacgtggacgacacgctgttgg

SEQ ID NO: 1054 - DNA, 23 bp, Homo sapiens
ctagagactcgaggagacccggg

SEQ ID NO: 1055 - DNA, 23 bp, Homo sapiens
ctaggacagctaggacaaccagg

SEQ ID NO: 1056 - DNA, 23 bp, Homo sapiens
ctataatatcgccctccctctgg

SEQ ID NO: 1057 - DNA, 23 bp, Homo sapiens
ctatgtcccggcccggccgcggg

SEQ ID NO: 1058 - DNA, 23 bp, Homo sapiens
ctcaaggagtgggagcctggggg

SEQ ID NO: 1059 - DNA, 23 bp, Homo sapiens
ctcacccactcctcgcccccagg

SEQ ID NO: 1060 - DNA, 23 bp, Homo sapiens
ctcagatcaccaagcacaagtgg

SEQ ID NO: 1061 - DNA, 23 bp, Homo sapiens
ctcagatcacccagcccaagtgg

SEQ ID NO: 1062 - DNA, 23 bp, Homo sapiens
ctcagatcacccagcgcaaatgg

SEQ ID NO: 1063 - DNA, 23 bp, Homo sapiens
ctcagatcacccagcgtaagtgg

SEQ ID NO: 1064 - DNA, 23 bp, Homo sapiens
ctcagatcaccgagcgcaagtgg

SEQ ID NO: 1065 - DNA, 23 bp, Homo sapiens
ctcagatcatccagcgcaagtgg

SEQ ID NO: 1066 - DNA, 23 bp, Homo sapiens
ctcagccactcctggtccccagg

SEQ ID NO: 1067 - DNA, 23 bp, Homo sapiens
ctcagcccctcctcgctcccagg

SEQ ID NO: 1068 - DNA, 23 bp, Homo sapiens
ctcagctactcctcgcccccagg

SEQ ID NO: 1069 - DNA, 23 bp, Homo sapiens
ctcaggcagtgacagtgcccagg

SEQ ID NO: 1070 - DNA, 23 bp, Homo sapiens
ctcaggctgcatgtaagtgatgg

SEQ ID NO: 1071 - DNA, 23 bp, Homo sapiens
ctcaggctgcgtgtaaatgatgg

SEQ ID NO: 1072 - DNA, 23 bp, Homo sapiens
ctcagggaaaccagaagtcctgg

SEQ ID NO: 1073 - DNA, 23 bp, Homo sapiens
ctcagggtggcttcatggtcagg

SEQ ID NO: 1074 - DNA, 23 bp, Homo sapiens
ctcatactcaatgtgtctgaagg

SEQ ID NO: 1075 - DNA, 23 bp, Homo sapiens
ctcatcccattttccattcaagg

SEQ ID NO: 1076 - DNA, 23 bp, Homo sapiens
ctcatcttcccttcctttcccgg

SEQ ID NO: 1077 - DNA, 23 bp, Homo sapiens
ctcatgaagtgggagcctggggg

SEQ ID NO: 1078 - DNA, 23 bp, Homo sapiens
ctcatggagagggagcctggggg

SEQ ID NO: 1079 - DNA, 23 bp, Homo sapiens
ctcatggagtaggagcctggggg

SEQ ID NO: 1080 - DNA, 23 bp, Homo sapiens
ctcatggagtggaagcctggggg

SEQ ID NO: 1081 - DNA, 23 bp, Homo sapiens
ctcatggagtgggaacctggggg

SEQ ID NO: 1082 - DNA, 23 bp, Homo sapiens
ctcattccccacggacgggccgg

SEQ ID NO: 1083 - DNA, 23 bp, Homo sapiens
ctccacagggtagaaacccaggg

SEQ ID NO: 1084 - DNA, 23 bp, Homo sapiens
ctccacagggtagaagcccaggg

SEQ ID NO: 1085 - DNA, 23 bp, Homo sapiens
ctccacagggtagaagctcaggg

SEQ ID NO: 1086 - DNA, 23 bp, Homo sapiens
ctcccaaacacaatatccaaagg

SEQ ID NO: 1087 - DNA, 23 bp, Homo sapiens
ctccctcaagaccagagggaggg

SEQ ID NO: 1088 - DNA, 23 bp, Homo sapiens
ctccctccttaacccatctcagg

SEQ ID NO: 1089 - DNA, 23 bp, Homo sapiens
ctccctccttatcccatctcagg

SEQ ID NO: 1090 - DNA, 23 bp, Homo sapiens
ctccgcagacacctgaagaatgg

SEQ ID NO: 1091 - DNA, 23 bp, Homo sapiens
ctccgcagatacctgaagaaagg

SEQ ID NO: 1092 - DNA, 23 bp, Homo sapiens
ctccgcagatacctggagaaagg

SEQ ID NO: 1093 - DNA, 23 bp, Homo sapiens
ctccgcagatacctggagaatgg

SEQ ID NO: 1094 - DNA, 23 bp, Homo sapiens
ctccgcagatacctggggaacgg

SEQ ID NO: 1095 - DNA, 23 bp, Homo sapiens
ctccgcagatatctggagaacgg

SEQ ID NO: 1096 - DNA, 23 bp, Homo sapiens
ctccgcagggtagaagcacaggg

SEQ ID NO: 1097 - DNA, 23 bp, Homo sapiens
ctccgcagggtagaagcccatgg

SEQ ID NO: 1098 - DNA, 23 bp, Homo sapiens
ctccgcctcccacttgcgcttgg

SEQ ID NO: 1099 - DNA, 23 bp, Homo sapiens
ctccggatgatgtgagaccctgg

SEQ ID NO: 1100 - DNA, 23 bp, Homo sapiens
ctcctaccggcgcggctccccgg

SEQ ID NO: 1101 - DNA, 23 bp, Homo sapiens
ctcctatagatcgcccgggatgg

SEQ ID NO: 1102 - DNA, 23 bp, Homo sapiens
ctcctccctgcgccgctccccgg

SEQ ID NO: 1103 - DNA, 23 bp, Homo sapiens
ctcctccctgcgcggcttcccgg

SEQ ID NO: 1104 - DNA, 23 bp, Homo sapiens
ctcctggattgccgcggacacgg

SEQ ID NO: 1105 - DNA, 23 bp, Homo sapiens
ctcctgtccaacgtctcctgcgg

SEQ ID NO: 1106 - DNA, 23 bp, Homo sapiens
ctcgacgggcgcctcctccgcgg

SEQ ID NO: 1107 - DNA, 23 bp, Homo sapiens
ctcgcacaggccctccaggtagg

SEQ ID NO: 1108 - DNA, 23 bp, Homo sapiens
ctcgcggccgggccgggacacgg

SEQ ID NO: 1109 - DNA, 23 bp, Homo sapiens
ctcggagccccgcggcttcgggg

SEQ ID NO: 1110 - DNA, 23 bp, Homo sapiens
ctcgggggctgggctgaccgcgg

SEQ ID NO: 1111 - DNA, 23 bp, Homo sapiens
ctcgtggaggccaggcctgcagg

SEQ ID NO: 1112 - DNA, 23 bp, Homo sapiens
ctcgttgtagtagccgcgcaggg

SEQ ID NO: 1113 - DNA, 23 bp, Homo sapiens
ctctcaactgctccgcctcacgg

SEQ ID NO: 1114 - DNA, 23 bp, Homo sapiens
ctctcaactgctcctccacacgg

SEQ ID NO: 1115 - DNA, 23 bp, Homo sapiens
ctctcaactgctctgccacacgg

SEQ ID NO: 1116 - DNA, 23 bp, Homo sapiens
ctctcagctgctccgccacatgg

SEQ ID NO: 1117 - DNA, 23 bp, Homo sapiens
ctctcagctgctccgccacccgg

SEQ ID NO: 1118 - DNA, 23 bp, Homo sapiens
ctctcagctgctccgccccacgg

SEQ ID NO: 1119 - DNA, 23 bp, Homo sapiens
ctctcagctgctcggccgcacgg

SEQ ID NO: 1120 - DNA, 23 bp, Homo sapiens
ctctccgctgctccgcccgacgg

SEQ ID NO: 1121 - DNA, 23 bp, Homo sapiens
ctctccgtcagtctgtgcctggg

SEQ ID NO: 1122 - DNA, 23 bp, Homo sapiens
ctctccgttgctccgcctcacgg

SEQ ID NO: 1123 - DNA, 23 bp, Homo sapiens
ctctcggtaagtctgtgccttgg

SEQ ID NO: 1124 - DNA, 23 bp, Homo sapiens
ctctcggtacgtctgtgtgttgg

SEQ ID NO: 1125 - DNA, 23 bp, Homo sapiens
ctctcggtcagcctgtgtgttgg

SEQ ID NO: 1126 - DNA, 23 bp, Homo sapiens
ctctcgttaagtctgtgtgttgg

SEQ ID NO: 1127 - DNA, 23 bp, Homo sapiens
ctctctgcggtcgaggttctggg

SEQ ID NO: 1128 - DNA, 23 bp, Homo sapiens
ctctctgctgctccgccacacgg

SEQ ID NO: 1129 - DNA, 23 bp, Homo sapiens
ctctctgctgctccgcctcatgg

SEQ ID NO: 1130 - DNA, 23 bp, Homo sapiens
ctctctggagacctttatcaggg

SEQ ID NO: 1131 - DNA, 23 bp, Homo sapiens
ctctgcactgctccgcctcacgg

SEQ ID NO: 1132 - DNA, 23 bp, Homo sapiens
ctctggacggtgtgagaccctgg

SEQ ID NO: 1133 - DNA, 23 bp, Homo sapiens
ctctggagagtgtgagaccctgg

SEQ ID NO: 1134 - DNA, 23 bp, Homo sapiens
ctctggagggtatgagaccctgg

SEQ ID NO: 1135 - DNA, 23 bp, Homo sapiens
ctctggatgctgtgagaacctgg

SEQ ID NO: 1136 - DNA, 23 bp, Homo sapiens
ctctggcgggtgtgagaccctgg

SEQ ID NO: 1137 - DNA, 23 bp, Homo sapiens
ctctgtcctgctccgccatacgg

SEQ ID NO: 1138 - DNA, 23 bp, Homo sapiens
ctcttagaccgcggcggacatgg

SEQ ID NO: 1139 - DNA, 23 bp, Homo sapiens
ctcttagctgctccgccacacgg

SEQ ID NO: 1140 - DNA, 23 bp, Homo sapiens
ctcttggaccgcggcggacacgg

SEQ ID NO: 1141 - DNA, 23 bp, Homo sapiens
ctctttgaccgcggcggacatgg

SEQ ID NO: 1142 - DNA, 23 bp, Homo sapiens
ctgaaaacgaaaccgggtaaagg

SEQ ID NO: 1143 - DNA, 23 bp, Homo sapiens
ctgaagggctccaggacttctgg

SEQ ID NO: 1144 - DNA, 23 bp, Homo sapiens
ctgaccgcgagggctgggccagg

SEQ ID NO: 1145 - DNA, 23 bp, Homo sapiens
ctgaccgcggggcctaggccagg

SEQ ID NO: 1146 - DNA, 23 bp, Homo sapiens
ctgaccgcggggtccgggctagg

SEQ ID NO: 1147 - DNA, 23 bp, Homo sapiens
ctgaccgcggggtcgaggccagg

SEQ ID NO: 1148 - DNA, 23 bp, Homo sapiens
ctgacctgcgccaccggccgggg

SEQ ID NO: 1149 - DNA, 23 bp, Homo sapiens
ctgagccgcggtatccgcggcgg

SEQ ID NO: 1150 - DNA, 23 bp, Homo sapiens
ctgagccgcggtgtccgcagcgg

SEQ ID NO: 1151 - DNA, 23 bp, Homo sapiens
ctgagccgctgtgtccccggcgg

SEQ ID NO: 1152 - DNA, 23 bp, Homo sapiens
ctgagctgccgtgtccgccgcgg

SEQ ID NO: 1153 - DNA, 23 bp, Homo sapiens
ctgatcgcctgtagatctccggg

SEQ ID NO: 1154 - DNA, 23 bp, Homo sapiens
ctgcaacgcgcgggtaccagggg

SEQ ID NO: 1155 - DNA, 23 bp, Homo sapiens
ctgcagacccaggcgggatcagg

SEQ ID NO: 1156 - DNA, 23 bp, Homo sapiens
ctgcagagcgcgggtaccagggg

SEQ ID NO: 1157 - DNA, 23 bp, Homo sapiens
ctgcagcacgcgggtaccagggg

SEQ ID NO: 1158 - DNA, 23 bp, Homo sapiens
ctgcagcgcacaggtaccagggg

SEQ ID NO: 1159 - DNA, 23 bp, Homo sapiens
ctgcagcgcacgagtaccagggg

SEQ ID NO: 1160 - DNA, 23 bp, Homo sapiens
ctgcagcgcactggtaccagggg

SEQ ID NO: 1161 - DNA, 23 bp, Homo sapiens
ctgcagcgcgcgggtaccaaggg

SEQ ID NO: 1162 - DNA, 23 bp, Homo sapiens
ctgcatgtaagtgatggcggtgg

SEQ ID NO: 1163 - DNA, 23 bp, Homo sapiens
ctgccccacactcagtgtttggg

SEQ ID NO: 1164 - DNA, 23 bp, Homo sapiens
ctgccccctagagcagcaggagg

SEQ ID NO: 1165 - DNA, 23 bp, Homo sapiens
ctgcccggccccgaccaaccagg

SEQ ID NO: 1166 - DNA, 23 bp, Homo sapiens
ctgcctggagggcgagtgcgtgg

SEQ ID NO: 1167 - DNA, 23 bp, Homo sapiens
ctgccttgtgtgggactgaaagg

SEQ ID NO: 1168 - DNA, 23 bp, Homo sapiens
ctgcggagatcacacggacctgg

SEQ ID NO: 1169 - DNA, 23 bp, Homo sapiens
ctgcggagatcacactgatctgg

SEQ ID NO: 1170 - DNA, 23 bp, Homo sapiens
ctgcggtcgaggttctgggcggg

SEQ ID NO: 1171 - DNA, 23 bp, Homo sapiens
ctgcgtccaggctggtgtttggg

SEQ ID NO: 1172 - DNA, 23 bp, Homo sapiens
ctgcgtccgggctggtgtctggg

SEQ ID NO: 1173 - DNA, 23 bp, Homo sapiens
ctgcgtgtaaatgatggcggcgg

SEQ ID NO: 1174 - DNA, 23 bp, Homo sapiens
ctgcgtgtaagtgatgccggtgg

SEQ ID NO: 1175 - DNA, 23 bp, Homo sapiens
ctgctctatccatggctcccggg

SEQ ID NO: 1176 - DNA, 23 bp, Homo sapiens
ctgctgtctaggacaattaaggg

SEQ ID NO: 1177 - DNA, 23 bp, Homo sapiens
ctggaaacccgacacccaatagg

SEQ ID NO: 1178 - DNA, 23 bp, Homo sapiens
ctggaaacccgacacccaattgg

SEQ ID NO: 1179 - DNA, 23 bp, Homo sapiens
ctggaaacccgacacccgatggg

SEQ ID NO: 1180 - DNA, 23 bp, Homo sapiens
ctggaccaatcgccctcctgagg

SEQ ID NO: 1181 - DNA, 23 bp, Homo sapiens
ctggaccgccgcggataccgcgg

SEQ ID NO: 1182 - DNA, 23 bp, Homo sapiens
ctggaccgccggggacacagcgg

SEQ ID NO: 1183 - DNA, 23 bp, Homo sapiens
ctggaccgctgcggacaccgcgg

SEQ ID NO: 1184 - DNA, 23 bp, Homo sapiens
ctggagcccttcagcagggtcgg

SEQ ID NO: 1185 - DNA, 23 bp, Homo sapiens
ctggatagagcaggaggggccgg

SEQ ID NO: 1186 - DNA, 23 bp, Homo sapiens
ctggatcgcggcggacaccgcgg

SEQ ID NO: 1187 - DNA, 23 bp, Homo sapiens
ctggattgccgcggacacggcgg

SEQ ID NO: 1188 - DNA, 23 bp, Homo sapiens
ctggccgcggggccggggccagg

SEQ ID NO: 1189 - DNA, 23 bp, Homo sapiens
ctggcctggtctccacaagctgg

SEQ ID NO: 1190 - DNA, 23 bp, Homo sapiens
ctgggaaaaggggaaggtgaggg

SEQ ID NO: 1191 - DNA, 23 bp, Homo sapiens
ctgggcactgtcactgcctgagg

SEQ ID NO: 1192 - DNA, 23 bp, Homo sapiens
ctgggcggggctcgggggctggg

SEQ ID NO: 1193 - DNA, 23 bp, Homo sapiens
ctgggcgggtgagtgcgggtcgg

SEQ ID NO: 1194 - DNA, 23 bp, Homo sapiens
ctgggctgaccacgggggcgggg

SEQ ID NO: 1195 - DNA, 23 bp, Homo sapiens
ctgggctgaccgcgagggctggg

SEQ ID NO: 1196 - DNA, 23 bp, Homo sapiens
ctgggctgaccgcggggtcgagg

SEQ ID NO: 1197 - DNA, 23 bp, Homo sapiens
ctggggcggggttcgggggacgg

SEQ ID NO: 1198 - DNA, 23 bp, Homo sapiens
ctggggcttgaaaccccagtggg

SEQ ID NO: 1199 - DNA, 23 bp, Homo sapiens
ctggggggggggggggcagaggg

SEQ ID NO: 1200 - DNA, 23 bp, Homo sapiens
ctgggttttgttgtcccactggg

SEQ ID NO: 1201 - DNA, 23 bp, Homo sapiens
ctggtcatacccgcggaggaggg

SEQ ID NO: 1202 - DNA, 23 bp, Homo sapiens
ctggttgcagtagccgcgcaggg

SEQ ID NO: 1203 - DNA, 23 bp, Homo sapiens
ctggttggtcggggccgggcagg

SEQ ID NO: 1204 - DNA, 23 bp, Homo sapiens
ctggttgtactagccgcgcaggg

SEQ ID NO: 1205 - DNA, 23 bp, Homo sapiens
ctggttgtagtacccgcgcaggg

SEQ ID NO: 1206 - DNA, 23 bp, Homo sapiens
ctggttgtagtagccgtgcaggg

SEQ ID NO: 1207 - DNA, 23 bp, Homo sapiens
ctggttgtcctagctgtcctagg

SEQ ID NO: 1208 - DNA, 23 bp, Homo sapiens
ctgtaggacagctgcctgtgtgg

SEQ ID NO: 1209 - DNA, 23 bp, Homo sapiens
ctgtgccccttccctaccccagg

SEQ ID NO: 1210 - DNA, 23 bp, Homo sapiens
ctgttccggtcccaatactccgg

SEQ ID NO: 1211 - DNA, 23 bp, Homo sapiens
cttaacccatctcagggtgaggg

SEQ ID NO: 1212 - DNA, 23 bp, Homo sapiens
cttagaccaccaagcacaagtgg

SEQ ID NO: 1213 - DNA, 23 bp, Homo sapiens
cttagatcacccagcgcaagtgg

SEQ ID NO: 1214 - DNA, 23 bp, Homo sapiens
cttatcccatctcagggtgaggg

SEQ ID NO: 1215 - DNA, 23 bp, Homo sapiens
cttcagacacattgagtatgagg

SEQ ID NO: 1216 - DNA, 23 bp, Homo sapiens
cttcatcaccgtgggctatgtgg

SEQ ID NO: 1217 - DNA, 23 bp, Homo sapiens
cttcatcgccgtgggctacatgg

SEQ ID NO: 1218 - DNA, 23 bp, Homo sapiens
cttcatcgctgtgggctacgtgg

SEQ ID NO: 1219 - DNA, 23 bp, Homo sapiens
cttcatctcagtgcgctacgtgg

SEQ ID NO: 1220 - DNA, 23 bp, Homo sapiens
cttcatctcagtgggttacgtgg

SEQ ID NO: 1221 - DNA, 23 bp, Homo sapiens
cttcatggagtgggaggctgggg

SEQ ID NO: 1222 - DNA, 23 bp, Homo sapiens
cttcatggtcagagacagcttgg

SEQ ID NO: 1223 - DNA, 23 bp, Homo sapiens
cttcatggtcagggacagcgtgg

SEQ ID NO: 1224 - DNA, 23 bp, Homo sapiens
cttcattaccgtgggctacgtgg

SEQ ID NO: 1225 - DNA, 23 bp, Homo sapiens
cttccagaagtgggaggctgtgg

SEQ ID NO: 1226 - DNA, 23 bp, Homo sapiens
cttcccctgactcatgatgctgg

SEQ ID NO: 1227 - DNA, 23 bp, Homo sapiens
cttcctcctacacatcttagcgg

SEQ ID NO: 1228 - DNA, 23 bp, Homo sapiens
cttcggtaaggagggggatgagg

SEQ ID NO: 1229 - DNA, 23 bp, Homo sapiens
cttcgtctcagtgggctacgtgg

SEQ ID NO: 1230 - DNA, 23 bp, Homo sapiens
cttgctctatccatggcgcccgg

SEQ ID NO: 1231 - DNA, 23 bp, Homo sapiens
cttggggtctagagtgggcaggg

SEQ ID NO: 1232 - DNA, 23 bp, Homo sapiens
cttgtggagaccaagcctgcagg

SEQ ID NO: 1233 - DNA, 23 bp, Homo sapiens
cttgtggagaccagaccggcagg

SEQ ID NO: 1234 - DNA, 23 bp, Homo sapiens
cttgtggagaccagacctgcagg

SEQ ID NO: 1235 - DNA, 23 bp, Homo sapiens
cttgtggagaccaggcgagcagg

SEQ ID NO: 1236 - DNA, 23 bp, Homo sapiens
cttgtgtcgggtccttcttccgg

SEQ ID NO: 1237 - DNA, 23 bp, Homo sapiens
ctttcaactgctccgccacatgg

SEQ ID NO: 1238 - DNA, 23 bp, Homo sapiens
ctttgccgtcgtaggcgtcctgg

SEQ ID NO: 1239 - DNA, 23 bp, Homo sapiens
gaaaccgggtaaaggcacctggg

SEQ ID NO: 1240 - DNA, 23 bp, Homo sapiens
gaaaccgggtaaagtcgcctggg

SEQ ID NO: 1241 - DNA, 23 bp, Homo sapiens
gaaaccgggttaaaggcgcctgg

SEQ ID NO: 1242 - DNA, 23 bp, Homo sapiens
gaaatacttcatggagtgggagg

SEQ ID NO: 1243 - DNA, 23 bp, Homo sapiens
gaaccccgcttcatcgccgtggg

SEQ ID NO: 1244 - DNA, 23 bp, Homo sapiens
gaaccgtgacctttcctctcagg

SEQ ID NO: 1245 - DNA, 23 bp, Homo sapiens
gaagaaggaccccacaagttggg

SEQ ID NO: 1246 - DNA, 23 bp, Homo sapiens
gaagacggctctgggaaaagggg

SEQ ID NO: 1247 - DNA, 23 bp, Homo sapiens
gaagagttctggtagggaagggg

SEQ ID NO: 1248 - DNA, 23 bp, Homo sapiens
gaagcacaagcgccaggcacagg

SEQ ID NO: 1249 - DNA, 23 bp, Homo sapiens
gaagcagggctccccgcggccgg

SEQ ID NO: 1250 - DNA, 23 bp, Homo sapiens
gaagccaatcagcgttgccgcgg

SEQ ID NO: 1251 - DNA, 23 bp, Homo sapiens
gaagcccctcatgctgtacatgg

SEQ ID NO: 1252 - DNA, 23 bp, Homo sapiens
gaagcggagctccccgcggccgg

SEQ ID NO: 1253 - DNA, 23 bp, Homo sapiens
gaagcgggactctccgcggccgg

SEQ ID NO: 1254 - DNA, 23 bp, Homo sapiens
gaagcggggctccccacggccgg

SEQ ID NO: 1255 - DNA, 23 bp, Homo sapiens
gaagcggggctccccgcagccgg

SEQ ID NO: 1256 - DNA, 23 bp, Homo sapiens
gaagcggggctccccgctgccgg

SEQ ID NO: 1257 - DNA, 23 bp, Homo sapiens
gaagcggggctcctcgcggccgg

SEQ ID NO: 1258 - DNA, 23 bp, Homo sapiens
gaagcggggttccccgcggccgg

SEQ ID NO: 1259 - DNA, 23 bp, Homo sapiens
gaaggaaacgctgcagcgcacgg

SEQ ID NO: 1260 - DNA, 23 bp, Homo sapiens
gaaggaaacgctgcagcgcgcgg

SEQ ID NO: 1261 - DNA, 23 bp, Homo sapiens
gaaggacggatgtatcaccgtgg

SEQ ID NO: 1262 - DNA, 23 bp, Homo sapiens
gaaggagaccctgcagcgcgcgg

SEQ ID NO: 1263 - DNA, 23 bp, Homo sapiens
gaaggagacgctgcaacgcgcgg

SEQ ID NO: 1264 - DNA, 23 bp, Homo sapiens
gaaggagacgctgcagagcgcgg

SEQ ID NO: 1265 - DNA, 23 bp, Homo sapiens
gaaggagacgctgcagcacgcgg

SEQ ID NO: 1266 - DNA, 23 bp, Homo sapiens
gaaggagacgctggagcgcgcgg

SEQ ID NO: 1267 - DNA, 23 bp, Homo sapiens
gaaggagatgctgcagcgcacgg

SEQ ID NO: 1268 - DNA, 23 bp, Homo sapiens
gaaggaggggccggagtattggg

SEQ ID NO: 1269 - DNA, 23 bp, Homo sapiens
gaagtcgctgttccctcgtcagg

SEQ ID NO: 1270 - DNA, 23 bp, Homo sapiens
gaagtcgctgttccctctgcagg

SEQ ID NO: 1271 - DNA, 23 bp, Homo sapiens
gaagtgaaactcagggaagtggg

SEQ ID NO: 1272 - DNA, 23 bp, Homo sapiens
gaagtgaaactcttgggagtggg

SEQ ID NO: 1273 - DNA, 23 bp, Homo sapiens
gaagtgggagcctgggggcgagg

SEQ ID NO: 1274 - DNA, 23 bp, Homo sapiens
gaatgtgaagaaatacctcatgg

SEQ ID NO: 1275 - DNA, 23 bp, Homo sapiens
gacaagaggaattatggggcggg

SEQ ID NO: 1276 - DNA, 23 bp, Homo sapiens
gacacaaaagtacaagcgccagg

SEQ ID NO: 1277 - DNA, 23 bp, Homo sapiens
gacacagaagaacaagcgccagg

SEQ ID NO: 1278 - DNA, 23 bp, Homo sapiens
gacacagaagcacaagcgccagg

SEQ ID NO: 1279 - DNA, 23 bp, Homo sapiens
gacacagatctgcaaggcccagg

SEQ ID NO: 1280 - DNA, 23 bp, Homo sapiens
gacaccgccacgtcccggcccgg

SEQ ID NO: 1281 - DNA, 23 bp, Homo sapiens
gacaccgccgtgtcctggcccgg

SEQ ID NO: 1282 - DNA, 23 bp, Homo sapiens
gacacctgatcagtattctaggg

SEQ ID NO: 1283 - DNA, 23 bp, Homo sapiens
gacatctctgaggaaatggaggg

SEQ ID NO: 1284 - DNA, 23 bp, Homo sapiens
gaccacagcgaccacagctacgg

SEQ ID NO: 1285 - DNA, 23 bp, Homo sapiens
gacccagttctcactccaattgg

SEQ ID NO: 1286 - DNA, 23 bp, Homo sapiens
gacccagttctcactcccatcgg

SEQ ID NO: 1287 - DNA, 23 bp, Homo sapiens
gacccagttctcactcctattgg

SEQ ID NO: 1288 - DNA, 23 bp, Homo sapiens
gacccctcattccccacggacgg

SEQ ID NO: 1289 - DNA, 23 bp, Homo sapiens
gacccctgatcagtattataggg

SEQ ID NO: 1290 - DNA, 23 bp, Homo sapiens
gacccgcccgacccacctcccgg

SEQ ID NO: 1291 - DNA, 23 bp, Homo sapiens
gacccgcccgaccctcctaccgg

SEQ ID NO: 1292 - DNA, 23 bp, Homo sapiens
gaccgtgagtgaccccggcccgg

SEQ ID NO: 1293 - DNA, 23 bp, Homo sapiens
gacctgacagcgggatggggagg

SEQ ID NO: 1294 - DNA, 23 bp, Homo sapiens
gacctgcgctcctggaccgccgg

SEQ ID NO: 1295 - DNA, 23 bp, Homo sapiens
gacctggcagcgggatagggagg

SEQ ID NO: 1296 - DNA, 23 bp, Homo sapiens
gacctggcagcgggatggcaagg

SEQ ID NO: 1297 - DNA, 23 bp, Homo sapiens
gacctggtagcgggatggcgagg

SEQ ID NO: 1298 - DNA, 23 bp, Homo sapiens
gacgagggaacagcgacttctgg

SEQ ID NO: 1299 - DNA, 23 bp, Homo sapiens
gacgatgtatggctgcgacatgg

SEQ ID NO: 1300 - DNA, 23 bp, Homo sapiens
gacgcagaagtacaagcgccagg

SEQ ID NO: 1301 - DNA, 23 bp, Homo sapiens
gacgccgagaatggccgtcatgg

SEQ ID NO: 1302 - DNA, 23 bp, Homo sapiens
gacgccgaggatggccatcatgg

SEQ ID NO: 1303 - DNA, 23 bp, Homo sapiens
gacgccgcgagtccgagaagggg

SEQ ID NO: 1304 - DNA, 23 bp, Homo sapiens
gacggagccccgggcgccgtggg

SEQ ID NO: 1305 - DNA, 23 bp, Homo sapiens
gacggccattctcggcgtctggg

SEQ ID NO: 1306 - DNA, 23 bp, Homo sapiens
gacggggctctcagtgtctcagg

SEQ ID NO: 1307 - DNA, 23 bp, Homo sapiens
gacggggctggccgcggggccgg

SEQ ID NO: 1308 - DNA, 23 bp, Homo sapiens
gacggtgagtgaccccggcctgg

SEQ ID NO: 1309 - DNA, 23 bp, Homo sapiens
gacggtgtgagaacctagcccgg

SEQ ID NO: 1310 - DNA, 23 bp, Homo sapiens
gacggtgtgagaccctggcccgg

SEQ ID NO: 1311 - DNA, 23 bp, Homo sapiens
gactccgagacccttgccccggg

SEQ ID NO: 1312 - DNA, 23 bp, Homo sapiens
gactgggctgaccacgggggcgg

SEQ ID NO: 1313 - DNA, 23 bp, Homo sapiens
gacttgtgactgctgggttcagg

SEQ ID NO: 1314 - DNA, 23 bp, Homo sapiens
gagaattctagtccctgaagagg

SEQ ID NO: 1315 - DNA, 23 bp, Homo sapiens
gagacactgagagccccgtccgg

SEQ ID NO: 1316 - DNA, 23 bp, Homo sapiens
gagaccaagcctgcaggggatgg

SEQ ID NO: 1317 - DNA, 23 bp, Homo sapiens
gagaccaggcgagcaggagatgg

SEQ ID NO: 1318 - DNA, 23 bp, Homo sapiens
gagacccgggccgtacgtcgggg

SEQ ID NO: 1319 - DNA, 23 bp, Homo sapiens
gagacctgggcgggtgagtgcgg

SEQ ID NO: 1320 - DNA, 23 bp, Homo sapiens
gagactgaccgagtggacctggg

SEQ ID NO: 1321 - DNA, 23 bp, Homo sapiens
gagagcctgcgaaacctgcgcgg

SEQ ID NO: 1322 - DNA, 23 bp, Homo sapiens
gagagcctgcggaccctgcgcgg

SEQ ID NO: 1323 - DNA, 23 bp, Homo sapiens
gagagcctgcggatcctgcgcgg

SEQ ID NO: 1324 - DNA, 23 bp, Homo sapiens
gagagcctggggaccaggagtgg

SEQ ID NO: 1325 - DNA, 23 bp, Homo sapiens
gagaggagccgcgggcgcggtgg

SEQ ID NO: 1326 - DNA, 23 bp, Homo sapiens
gagatcccagaaaggagtcaggg

SEQ ID NO: 1327 - DNA, 23 bp, Homo sapiens
gagatccgccccgaggccgcggg

SEQ ID NO: 1328 - DNA, 23 bp, Homo sapiens
gagcaccgcttcatctcagtggg

SEQ ID NO: 1329 - DNA, 23 bp, Homo sapiens
gagcagcaggaggagagttcggg

SEQ ID NO: 1330 - DNA, 23 bp, Homo sapiens
gagcagcaggatgagggttcagg

SEQ ID NO: 1331 - DNA, 23 bp, Homo sapiens
gagcatgtacggctgcgacctgg

SEQ ID NO: 1332 - DNA, 23 bp, Homo sapiens
gagcatgtatggctgcgacgtgg

SEQ ID NO: 1333 - DNA, 23 bp, Homo sapiens
gagccaaaggatggagccgcggg

SEQ ID NO: 1334 - DNA, 23 bp, Homo sapiens
gagccatggatagagcaggaggg

SEQ ID NO: 1335 - DNA, 23 bp, Homo sapiens
gagccccaaacactgagtgtggg

SEQ ID NO: 1336 - DNA, 23 bp, Homo sapiens
gagccccaggcgactttacccgg

SEQ ID NO: 1337 - DNA, 23 bp, Homo sapiens
gagccccaggcgcctttacccgg

SEQ ID NO: 1338 - DNA, 23 bp, Homo sapiens
gagccccgcttcatcgctgtggg

SEQ ID NO: 1339 - DNA, 23 bp, Homo sapiens
gagccccgcttcattaccgtggg

SEQ ID NO: 1340 - DNA, 23 bp, Homo sapiens
gagccccgcttcgtctcagtggg

SEQ ID NO: 1341 - DNA, 23 bp, Homo sapiens
gagcccctcagcctccactcagg

SEQ ID NO: 1342 - DNA, 23 bp, Homo sapiens
gagccctgcttcatcgccgtggg

SEQ ID NO: 1343 - DNA, 23 bp, Homo sapiens
gagccgcctcccacttgcgctgg

SEQ ID NO: 1344 - DNA, 23 bp, Homo sapiens
gagccgtggatggagcaggaggg

SEQ ID NO: 1345 - DNA, 23 bp, Homo sapiens
gagctcaggtagggaaggggtgg

SEQ ID NO: 1346 - DNA, 23 bp, Homo sapiens
gagctccccgcggccgggccagg

SEQ ID NO: 1347 - DNA, 23 bp, Homo sapiens
gagctccgcttcatcgcagtggg

SEQ ID NO: 1348 - DNA, 23 bp, Homo sapiens
gagctcctccacacgcccaccgg

SEQ ID NO: 1349 - DNA, 23 bp, Homo sapiens
gagcttgtacggctgcgacgtgg

SEQ ID NO: 1350 - DNA, 23 bp, Homo sapiens
gaggacctgcggaacctgcgcgg

SEQ ID NO: 1351 - DNA, 23 bp, Homo sapiens
gaggacctgcggaccctgcgcgg

SEQ ID NO: 1352 - DNA, 23 bp, Homo sapiens
gaggacggtgaccccggcccggg

SEQ ID NO: 1353 - DNA, 23 bp, Homo sapiens
gaggagggaacagcgacctctgg

SEQ ID NO: 1354 - DNA, 23 bp, Homo sapiens
gaggatgtaaggctgcgacgtgg

SEQ ID NO: 1355 - DNA, 23 bp, Homo sapiens
gaggatgtacggctgggacctgg

SEQ ID NO: 1356 - DNA, 23 bp, Homo sapiens
gaggatgtatggttgcgacgtgg

SEQ ID NO: 1357 - DNA, 23 bp, Homo sapiens
gaggatgtctggctgcgacccgg

SEQ ID NO: 1358 - DNA, 23 bp, Homo sapiens
gaggccaggcctgcaggggatgg

SEQ ID NO: 1359 - DNA, 23 bp, Homo sapiens
gaggcccaggtgcctttacccgg

SEQ ID NO: 1360 - DNA, 23 bp, Homo sapiens
gaggcccttgaagtcacaaaggg

SEQ ID NO: 1361 - DNA, 23 bp, Homo sapiens
gaggcctgcgccccgggccgggg

SEQ ID NO: 1362 - DNA, 23 bp, Homo sapiens
gaggctgtggtggtgccttctgg

SEQ ID NO: 1363 - DNA, 23 bp, Homo sapiens
gagggagcctgggggcgaggagg

SEQ ID NO: 1364 - DNA, 23 bp, Homo sapiens
gagggcaccgcagatacctgtgg

SEQ ID NO: 1365 - DNA, 23 bp, Homo sapiens
gagggccccctctgctgtctagg

SEQ ID NO: 1366 - DNA, 23 bp, Homo sapiens
gaggggagccgcaggcgccgtgg

SEQ ID NO: 1367 - DNA, 23 bp, Homo sapiens
gaggggcccgaccctcctcccgg

SEQ ID NO: 1368 - DNA, 23 bp, Homo sapiens
gaggggccggaatattgggacgg

SEQ ID NO: 1369 - DNA, 23 bp, Homo sapiens
gaggggccggacggagtattggg

SEQ ID NO: 1370 - DNA, 23 bp, Homo sapiens
gaggggcttcggtaaggaggggg

SEQ ID NO: 1371 - DNA, 23 bp, Homo sapiens
gaggtcgctgttccctcctcagg

SEQ ID NO: 1372 - DNA, 23 bp, Homo sapiens
gaggtgggtgagctcccccatgg

SEQ ID NO: 1373 - DNA, 23 bp, Homo sapiens
gaggttcccctaaaatcacatgg

SEQ ID NO: 1374 - DNA, 23 bp, Homo sapiens
gaggttctgggcgggtcccgcgg

SEQ ID NO: 1375 - DNA, 23 bp, Homo sapiens
gagtcactctctggaaacccagg

SEQ ID NO: 1376 - DNA, 23 bp, Homo sapiens
gagtccaagaggggagccgcagg

SEQ ID NO: 1377 - DNA, 23 bp, Homo sapiens
gagtcccgcttcatctcagtggg

SEQ ID NO: 1378 - DNA, 23 bp, Homo sapiens
gagtccgagaaggggagccgcgg

SEQ ID NO: 1379 - DNA, 23 bp, Homo sapiens
gagtccgaggacggagccctggg

SEQ ID NO: 1380 - DNA, 23 bp, Homo sapiens
gagtccgaggatggagccccggg

SEQ ID NO: 1381 - DNA, 23 bp, Homo sapiens
gagtccgaggatggcgccctggg

SEQ ID NO: 1382 - DNA, 23 bp, Homo sapiens
gagtccgaggggggagccgcggg

SEQ ID NO: 1383 - DNA, 23 bp, Homo sapiens
gagtggcccgaccctcctcccgg

SEQ ID NO: 1384 - DNA, 23 bp, Homo sapiens
gagtggctccgcagatacctggg

SEQ ID NO: 1385 - DNA, 23 bp, Homo sapiens
gagtgggcaggggggtggtgggg

SEQ ID NO: 1386 - DNA, 23 bp, Homo sapiens
gagtgggcggggggggggtgggg

SEQ ID NO: 1387 - DNA, 23 bp, Homo sapiens
gatagagcaggaggtgccggagg

SEQ ID NO: 1388 - DNA, 23 bp, Homo sapiens
gatatccgccccgaagccgcggg

SEQ ID NO: 1389 - DNA, 23 bp, Homo sapiens
gatatcggacccggagactgtgg

SEQ ID NO: 1390 - DNA, 23 bp, Homo sapiens
gatcacacggacctggcagcggg

SEQ ID NO: 1391 - DNA, 23 bp, Homo sapiens
gatcacactgacctgacagcggg

SEQ ID NO: 1392 - DNA, 23 bp, Homo sapiens
gatcacactgacctggtagcggg

SEQ ID NO: 1393 - DNA, 23 bp, Homo sapiens
gatcacactgatctggcagtggg

SEQ ID NO: 1394 - DNA, 23 bp, Homo sapiens
gatcaccaagcacaagtgggagg

SEQ ID NO: 1395 - DNA, 23 bp, Homo sapiens
gatcacccagcacaagttggagg

SEQ ID NO: 1396 - DNA, 23 bp, Homo sapiens
gatcacccagcccaagtgggagg

SEQ ID NO: 1397 - DNA, 23 bp, Homo sapiens
gatcacccagcccaagttggagg

SEQ ID NO: 1398 - DNA, 23 bp, Homo sapiens
gatcacccagcgcaaatgggagg

SEQ ID NO: 1399 - DNA, 23 bp, Homo sapiens
gatcacccagcgtaagtgggagg

SEQ ID NO: 1400 - DNA, 23 bp, Homo sapiens
gatcaccgagcgcaagtgggagg

SEQ ID NO: 1401 - DNA, 23 bp, Homo sapiens
gatcactcagcgcaagttggagg

SEQ ID NO: 1402 - DNA, 23 bp, Homo sapiens
gatcatccagcgcaagtgggagg

SEQ ID NO: 1403 - DNA, 23 bp, Homo sapiens
gatccgccccctgaggccgcggg

SEQ ID NO: 1404 - DNA, 23 bp, Homo sapiens
gatctcggaccctgagactcggg

SEQ ID NO: 1405 - DNA, 23 bp, Homo sapiens
gatctgagccgcggtatccgcgg

SEQ ID NO: 1406 - DNA, 23 bp, Homo sapiens
gatctgagccgctgtgtccccgg

SEQ ID NO: 1407 - DNA, 23 bp, Homo sapiens
gatctggcagtgggatggggagg

SEQ ID NO: 1408 - DNA, 23 bp, Homo sapiens
gatcttcaagaccaacacacagg

SEQ ID NO: 1409 - DNA, 23 bp, Homo sapiens
gatgctgtgagaacctggcccgg

SEQ ID NO: 1410 - DNA, 23 bp, Homo sapiens
gatggccatcctcggcgtctggg

SEQ ID NO: 1411 - DNA, 23 bp, Homo sapiens
gatgggataaggagggagatggg

SEQ ID NO: 1412 - DNA, 23 bp, Homo sapiens
gatgggttaaggagggagatggg

SEQ ID NO: 1413 - DNA, 23 bp, Homo sapiens
gatgtaagccttgccgtcgtagg

SEQ ID NO: 1414 - DNA, 23 bp, Homo sapiens
gatgtaatccctgccgtcgtagg

SEQ ID NO: 1415 - DNA, 23 bp, Homo sapiens
gatgtaatccttgccatcgtagg

SEQ ID NO: 1416 - DNA, 23 bp, Homo sapiens
gatgtaatccttgccgtcctagg

SEQ ID NO: 1417 - DNA, 23 bp, Homo sapiens
gatgtaatccttgccgtcgcagg

SEQ ID NO: 1418 - DNA, 23 bp, Homo sapiens
gatgtaatccttgccttcgtagg

SEQ ID NO: 1419 - DNA, 23 bp, Homo sapiens
gatgtatcaccttgatattatgg

SEQ ID NO: 1420 - DNA, 23 bp, Homo sapiens
gatgtcatccttgccgtcgtagg

SEQ ID NO: 1421 - DNA, 23 bp, Homo sapiens
gattacccagcgcaagttggagg

SEQ ID NO: 1422 - DNA, 23 bp, Homo sapiens
gattccagcatcatgagtcaggg

SEQ ID NO: 1423 - DNA, 23 bp, Homo sapiens
gattccagcattcatgagtcggg

SEQ ID NO: 1424 - DNA, 23 bp, Homo sapiens
gattctcccgatggccgtcatgg

SEQ ID NO: 1425 - DNA, 23 bp, Homo sapiens
gcaaccatacatcctctggatgg

SEQ ID NO: 1426 - DNA, 23 bp, Homo sapiens
gcaacggagagcctacctggagg

SEQ ID NO: 1427 - DNA, 23 bp, Homo sapiens
gcaagggtctcggagtcccgcgg

SEQ ID NO: 1428 - DNA, 23 bp, Homo sapiens
gcaagttggaggcggcccgtggg

SEQ ID NO: 1429 - DNA, 23 bp, Homo sapiens
gcacagggcccagcacctcaggg

SEQ ID NO: 1430 - DNA, 23 bp, Homo sapiens
gcacaggtaccaggggccacggg

SEQ ID NO: 1431 - DNA, 23 bp, Homo sapiens
gcacatgtgacaatgaaagacgg

SEQ ID NO: 1432 - DNA, 23 bp, Homo sapiens
gcaccgtgacttttcctctcagg

SEQ ID NO: 1433 - DNA, 23 bp, Homo sapiens
gcacctgcatgtgtctgtgttgg

SEQ ID NO: 1434 - DNA, 23 bp, Homo sapiens
gcacgagtaccaggggccacggg

SEQ ID NO: 1435 - DNA, 23 bp, Homo sapiens
gcacgggccgcctccaacttggg

SEQ ID NO: 1436 - DNA, 23 bp, Homo sapiens
gcacgggtaccagggaccacggg

SEQ ID NO: 1437 - DNA, 23 bp, Homo sapiens
gcactcacccgcccaggtctcgg

SEQ ID NO: 1438 - DNA, 23 bp, Homo sapiens
gcactggtaccaggggccacggg

SEQ ID NO: 1439 - DNA, 23 bp, Homo sapiens
gcagagggaacagcgacttctgg

SEQ ID NO: 1440 - DNA, 23 bp, Homo sapiens
gcagcacgcctacgacggcaagg

SEQ ID NO: 1441 - DNA, 23 bp, Homo sapiens
gcagccaaacatcctctggacgg

SEQ ID NO: 1442 - DNA, 23 bp, Homo sapiens
gcagccatacatcatctggaggg

SEQ ID NO: 1443 - DNA, 23 bp, Homo sapiens
gcagccatacatccgctggaggg

SEQ ID NO: 1444 - DNA, 23 bp, Homo sapiens
gcagccatacatgctctggaggg

SEQ ID NO: 1445 - DNA, 23 bp, Homo sapiens
gcagcccctcatgctgcacatgg

SEQ ID NO: 1446 - DNA, 23 bp, Homo sapiens
gcagcccctcatgctgtacctgg

SEQ ID NO: 1447 - DNA, 23 bp, Homo sapiens
gcagccgggccgggacatggcgg

SEQ ID NO: 1448 - DNA, 23 bp, Homo sapiens
gcagccgtacaagctctggaggg

SEQ ID NO: 1449 - DNA, 23 bp, Homo sapiens
gcagccgtacatcctctggatgg

SEQ ID NO: 1450 - DNA, 23 bp, Homo sapiens
gcagccgtacatcctctggcggg

SEQ ID NO: 1451 - DNA, 23 bp, Homo sapiens
gcagccgtacatcgtctggaggg

SEQ ID NO: 1452 - DNA, 23 bp, Homo sapiens
gcagcggagaacctacctggagg

SEQ ID NO: 1453 - DNA, 23 bp, Homo sapiens
gcagctaagagcctacctggagg

SEQ ID NO: 1454 - DNA, 23 bp, Homo sapiens
gcagctgagagcctaccgggagg

SEQ ID NO: 1455 - DNA, 23 bp, Homo sapiens
gcagctgagagcctacctggtgg

SEQ ID NO: 1456 - DNA, 23 bp, Homo sapiens
gcagctgagagcctgcctggagg

SEQ ID NO: 1457 - DNA, 23 bp, Homo sapiens
gcaggacgcctaagacggcaagg

SEQ ID NO: 1458 - DNA, 23 bp, Homo sapiens
gcaggacgcctacgaaggcaagg

SEQ ID NO: 1459 - DNA, 23 bp, Homo sapiens
gcaggaggggccagagtattggg

SEQ ID NO: 1460 - DNA, 23 bp, Homo sapiens
gcaggaggggccggagcattggg

SEQ ID NO: 1461 - DNA, 23 bp, Homo sapiens
gcaggaggggccggagtactggg

SEQ ID NO: 1462 - DNA, 23 bp, Homo sapiens
gcaggaggggccggagtattagg

SEQ ID NO: 1463 - DNA, 23 bp, Homo sapiens
gcaggaggggccggagtgttggg

SEQ ID NO: 1464 - DNA, 23 bp, Homo sapiens
gcaggaggggctggagtattggg

SEQ ID NO: 1465 - DNA, 23 bp, Homo sapiens
gcaggaggtgccggaggattggg

SEQ ID NO: 1466 - DNA, 23 bp, Homo sapiens
gcaggatccgcaggctctctcgg

SEQ ID NO: 1467 - DNA, 23 bp, Homo sapiens
gcaggcgccgtgggtggagcagg

SEQ ID NO: 1468 - DNA, 23 bp, Homo sapiens
gcagggccatgtgattttagggg

SEQ ID NO: 1469 - DNA, 23 bp, Homo sapiens
gcaggggggtggtggggcagagg

SEQ ID NO: 1470 - DNA, 23 bp, Homo sapiens
gcaggtcgcctacgacggcaagg

SEQ ID NO: 1471 - DNA, 23 bp, Homo sapiens
gcaggttccgcaggcccactcgg

SEQ ID NO: 1472 - DNA, 23 bp, Homo sapiens
gcaggttccgcaggtcctctcgg

SEQ ID NO: 1473 - DNA, 23 bp, Homo sapiens
gcaggtttcgcaggctctctcgg

SEQ ID NO: 1474 - DNA, 23 bp, Homo sapiens
gcagtatgcctacgacggcaagg

SEQ ID NO: 1475 - DNA, 23 bp, Homo sapiens
gcagtgcagagcctacctggagg

SEQ ID NO: 1476 - DNA, 23 bp, Homo sapiens
gcagtggagagcccacctggagg

SEQ ID NO: 1477 - DNA, 23 bp, Homo sapiens
gcagtggagagtctacctggagg

SEQ ID NO: 1478 - DNA, 23 bp, Homo sapiens
gcagtggtcgaagtggtcaaagg

SEQ ID NO: 1479 - DNA, 23 bp, Homo sapiens
gcagttgaaagcctacctggagg

SEQ ID NO: 1480 - DNA, 23 bp, Homo sapiens
gcagttgccgcaggttcactcgg

SEQ ID NO: 1481 - DNA, 23 bp, Homo sapiens
gcagtttccgcaggctcactcgg

SEQ ID NO: 1482 - DNA, 23 bp, Homo sapiens
gcagtttccgcaggttcattcgg

SEQ ID NO: 1483 - DNA, 23 bp, Homo sapiens
gcatctccttcccgttctccagg

SEQ ID NO: 1484 - DNA, 23 bp, Homo sapiens
gcatgtacggctgcgacctgggg

SEQ ID NO: 1485 - DNA, 23 bp, Homo sapiens
gcatgtatggctgcgacgtgggg

SEQ ID NO: 1486 - DNA, 23 bp, Homo sapiens
gcatgtgtctgtgttggtgtagg

SEQ ID NO: 1487 - DNA, 23 bp, Homo sapiens
gccacgtcccggcccggccgcgg

SEQ ID NO: 1488 - DNA, 23 bp, Homo sapiens
gccatgacccggcccggccgcgg

SEQ ID NO: 1489 - DNA, 23 bp, Homo sapiens
gccatgtcccggcccggccgtgg

SEQ ID NO: 1490 - DNA, 23 bp, Homo sapiens
gccatgtcccggcccggctgcgg

SEQ ID NO: 1491 - DNA, 23 bp, Homo sapiens
gcccatggcccagcacctcaggg

SEQ ID NO: 1492 - DNA, 23 bp, Homo sapiens
gcccgacccacctcccggcgcgg

SEQ ID NO: 1493 - DNA, 23 bp, Homo sapiens
gcccgaccctcctaccggcgcgg

SEQ ID NO: 1494 - DNA, 23 bp, Homo sapiens
gcccgcaggagacgttggacagg

SEQ ID NO: 1495 - DNA, 23 bp, Homo sapiens
gcccggccccgaccaaccagggg

SEQ ID NO: 1496 - DNA, 23 bp, Homo sapiens
gcccgggatggcctcccacgagg

SEQ ID NO: 1497 - DNA, 23 bp, Homo sapiens
gcccgtccgtggggaatgagggg

SEQ ID NO: 1498 - DNA, 23 bp, Homo sapiens
gccctcccttgaatggaaaatgg

SEQ ID NO: 1499 - DNA, 23 bp, Homo sapiens
gccctgaccgagacctgggcggg

SEQ ID NO: 1500 - DNA, 23 bp, Homo sapiens
gccgcgccgggaggtgggtcggg

SEQ ID NO: 1501 - DNA, 23 bp, Homo sapiens
gccgcgccggtaggagggtcggg

SEQ ID NO: 1502 - DNA, 23 bp, Homo sapiens
gccgcgggcgccgtgggtggagg

SEQ ID NO: 1503 - DNA, 23 bp, Homo sapiens
gccggacggagtattgggaccgg

SEQ ID NO: 1504 - DNA, 23 bp, Homo sapiens
gccgtacgtcggggttggggagg

SEQ ID NO: 1505 - DNA, 23 bp, Homo sapiens
gccgtgggtggaggaggggccgg

SEQ ID NO: 1506 - DNA, 23 bp, Homo sapiens
gccgtgtcccggccaggccgcgg

SEQ ID NO: 1507 - DNA, 23 bp, Homo sapiens
gccgtgtcccggcctggccgcgg

SEQ ID NO: 1508 - DNA, 23 bp, Homo sapiens
gccgtgtccgccaggagctcagg

SEQ ID NO: 1509 - DNA, 23 bp, Homo sapiens
gccgtgtccgggcccggccgcgg

SEQ ID NO: 1510 - DNA, 23 bp, Homo sapiens
gccgtgtcctggcccggccgcgg

SEQ ID NO: 1511 - DNA, 23 bp, Homo sapiens
gcctaaactgaaaacgaaaccgg

SEQ ID NO: 1512 - DNA, 23 bp, Homo sapiens
gcctcctccgcgggtatgaccgg

SEQ ID NO: 1513 - DNA, 23 bp, Homo sapiens
gcctctatggagaggagcgaggg

SEQ ID NO: 1514 - DNA, 23 bp, Homo sapiens
gcctctgcggagaggagggaggg

SEQ ID NO: 1515 - DNA, 23 bp, Homo sapiens
gcctctgctgagaggagcgaggg

SEQ ID NO: 1516 - DNA, 23 bp, Homo sapiens
gcctgcgtccgctggtgtctggg

SEQ ID NO: 1517 - DNA, 23 bp, Homo sapiens
gcgaccccgcgagtccgagaggg

SEQ ID NO: 1518 - DNA, 23 bp, Homo sapiens
gcgaccccggccgtacgtggggg

SEQ ID NO: 1519 - DNA, 23 bp, Homo sapiens
gcgacgccgcaagtccgagaggg

SEQ ID NO: 1520 - DNA, 23 bp, Homo sapiens
gcgacgccgcgagtccgagaagg

SEQ ID NO: 1521 - DNA, 23 bp, Homo sapiens
gcgacgccgcgagtccgaggggg

SEQ ID NO: 1522 - DNA, 23 bp, Homo sapiens
gcgactccgcgagtccaagaggg

SEQ ID NO: 1523 - DNA, 23 bp, Homo sapiens
gcgagaccggtgagtgaccccgg

SEQ ID NO: 1524 - DNA, 23 bp, Homo sapiens
gcgaggaccgtgagtgaccccgg

SEQ ID NO: 1525 - DNA, 23 bp, Homo sapiens
gcgatcagggaggcgccctgtgg

SEQ ID NO: 1526 - DNA, 23 bp, Homo sapiens
gcgcaagtgggaggcggcccggg

SEQ ID NO: 1527 - DNA, 23 bp, Homo sapiens
gcgcccgcggctccatcctttgg

SEQ ID NO: 1528 - DNA, 23 bp, Homo sapiens
gcgcccgcggctccccttctcgg

SEQ ID NO: 1529 - DNA, 23 bp, Homo sapiens
gcgccctggatagagcaggaggg

SEQ ID NO: 1530 - DNA, 23 bp, Homo sapiens
gcgccgggaggtgggtcgggcgg

SEQ ID NO: 1531 - DNA, 23 bp, Homo sapiens
gcgccggtaggagggtcgggcgg

SEQ ID NO: 1532 - DNA, 23 bp, Homo sapiens
gcgccgtgggtggagaaggaggg

SEQ ID NO: 1533 - DNA, 23 bp, Homo sapiens
gcgcgatccgcagtttctctcgg

SEQ ID NO: 1534 - DNA, 23 bp, Homo sapiens
gcgcgatcctcaggttctctcgg

SEQ ID NO: 1535 - DNA, 23 bp, Homo sapiens
gcgcgcgggtaccggggcagtgg

SEQ ID NO: 1536 - DNA, 23 bp, Homo sapiens
gcgcggctacaaccagagcgagg

SEQ ID NO: 1537 - DNA, 23 bp, Homo sapiens
gcgcgggtaccaagggcagtggg

SEQ ID NO: 1538 - DNA, 23 bp, Homo sapiens
gcgcgggtaccaggggccacagg

SEQ ID NO: 1539 - DNA, 23 bp, Homo sapiens
gcgcgggtaccggggcagtgggg

SEQ ID NO: 1540 - DNA, 23 bp, Homo sapiens
gcgcggtgcgcaggctctctcgg

SEQ ID NO: 1541 - DNA, 23 bp, Homo sapiens
gcgcggtggatagagcaggaggg

SEQ ID NO: 1542 - DNA, 23 bp, Homo sapiens
gcgctgagtgatctgagccgcgg

SEQ ID NO: 1543 - DNA, 23 bp, Homo sapiens
gcgctgggtaatctgagccgcgg

SEQ ID NO: 1544 - DNA, 23 bp, Homo sapiens
gcgctgggtgatctaagccgcgg

SEQ ID NO: 1545 - DNA, 23 bp, Homo sapiens
gcggagtctcccacttgcgctgg

SEQ ID NO: 1546 - DNA, 23 bp, Homo sapiens
gcggagttggggaatctccaagg

SEQ ID NO: 1547 - DNA, 23 bp, Homo sapiens
gcggatgtatggctgcgacctgg

SEQ ID NO: 1548 - DNA, 23 bp, Homo sapiens
gcggccaggccgggacacggagg

SEQ ID NO: 1549 - DNA, 23 bp, Homo sapiens
gcggccaggccgggacacggcgg

SEQ ID NO: 1550 - DNA, 23 bp, Homo sapiens
gcggccgggccaggacacggcgg

SEQ ID NO: 1551 - DNA, 23 bp, Homo sapiens
gcggccgggcccggacacggcgg

SEQ ID NO: 1552 - DNA, 23 bp, Homo sapiens
gcggccgggccgggacatagcgg

SEQ ID NO: 1553 - DNA, 23 bp, Homo sapiens
gcggccgggccgggacgtggcgg

SEQ ID NO: 1554 - DNA, 23 bp, Homo sapiens
gcggccgggccgggtcatggcgg

SEQ ID NO: 1555 - DNA, 23 bp, Homo sapiens
gcggcctggccgggacacggcgg

SEQ ID NO: 1556 - DNA, 23 bp, Homo sapiens
gcggcgcagggaggagggtcggg

SEQ ID NO: 1557 - DNA, 23 bp, Homo sapiens
gcggcgcagggaggtgggtcggg

SEQ ID NO: 1558 - DNA, 23 bp, Homo sapiens
gcgggagccgtggatggagcagg

SEQ ID NO: 1559 - DNA, 23 bp, Homo sapiens
gcgggcgccctggatagagcagg

SEQ ID NO: 1560 - DNA, 23 bp, Homo sapiens
gcgggcgccgtgggtggagaagg

SEQ ID NO: 1561 - DNA, 23 bp, Homo sapiens
gcgggcgccgtgggtggaggagg

SEQ ID NO: 1562 - DNA, 23 bp, Homo sapiens
gcgggcgcggtggatagagcagg

SEQ ID NO: 1563 - DNA, 23 bp, Homo sapiens
gcggggcggggccggggggacgg

SEQ ID NO: 1564 - DNA, 23 bp, Homo sapiens
gcggggcggggcggggccggggg

SEQ ID NO: 1565 - DNA, 23 bp, Homo sapiens
gcgggtgagtgcgggtcggcagg

SEQ ID NO: 1566 - DNA, 23 bp, Homo sapiens
gcgtccagcgacagtgcccaggg

SEQ ID NO: 1567 - DNA, 23 bp, Homo sapiens
gcgtctccttaccgttctccagg

SEQ ID NO: 1568 - DNA, 23 bp, Homo sapiens
gcgtctccttcccattctccagg

SEQ ID NO: 1569 - DNA, 23 bp, Homo sapiens
gcgtctccttccctttctccagg

SEQ ID NO: 1570 - DNA, 23 bp, Homo sapiens
gcgtctccttccctttcttcagg

SEQ ID NO: 1571 - DNA, 23 bp, Homo sapiens
gcgtctccttccggttctccagg

SEQ ID NO: 1572 - DNA, 23 bp, Homo sapiens
gcgtctccttcctgttctccagg

SEQ ID NO: 1573 - DNA, 23 bp, Homo sapiens
gcgtctctgaggaaatggagggg

SEQ ID NO: 1574 - DNA, 23 bp, Homo sapiens
gcgtctctttcccgttctccagg

SEQ ID NO: 1575 - DNA, 23 bp, Homo sapiens
gcgtcttcttcccgttccccagg

SEQ ID NO: 1576 - DNA, 23 bp, Homo sapiens
gcgttttgggggcgtctctcagg

SEQ ID NO: 1577 - DNA, 23 bp, Homo sapiens
gctacgccgcgagtccaagaggg

SEQ ID NO: 1578 - DNA, 23 bp, Homo sapiens
gctatgtcccggcccggccgcgg

SEQ ID NO: 1579 - DNA, 23 bp, Homo sapiens
gctcaggtagggaaggggtgggg

SEQ ID NO: 1580 - DNA, 23 bp, Homo sapiens
gctcccctctcggactcgcgggg

SEQ ID NO: 1581 - DNA, 23 bp, Homo sapiens
gctctctgcggtcgaggttctgg

SEQ ID NO: 1582 - DNA, 23 bp, Homo sapiens
gctgaggggctcagaagtgctgg

SEQ ID NO: 1583 - DNA, 23 bp, Homo sapiens
gctgcaacctggggcccgacggg

SEQ ID NO: 1584 - DNA, 23 bp, Homo sapiens
gctgcaacgcgcgggtaccaggg

SEQ ID NO: 1585 - DNA, 23 bp, Homo sapiens
gctgcagagcgcgggtaccaggg

SEQ ID NO: 1586 - DNA, 23 bp, Homo sapiens
gctgcagcacgcgggtaccaggg

SEQ ID NO: 1587 - DNA, 23 bp, Homo sapiens
gctgcagcgcacaggtaccaggg

SEQ ID NO: 1588 - DNA, 23 bp, Homo sapiens
gctgcagcgcacgagtaccaggg

SEQ ID NO: 1589 - DNA, 23 bp, Homo sapiens
gctgcagcgcactggtaccaggg

SEQ ID NO: 1590 - DNA, 23 bp, Homo sapiens
gctgcagcgcgcgggtaccaagg

SEQ ID NO: 1591 - DNA, 23 bp, Homo sapiens
gctgcagcgcgcgggtaccgggg

SEQ ID NO: 1592 - DNA, 23 bp, Homo sapiens
gctgcgacatggggccggacggg

SEQ ID NO: 1593 - DNA, 23 bp, Homo sapiens
gctgcgacccggggcccgacggg

SEQ ID NO: 1594 - DNA, 23 bp, Homo sapiens
gctgcgacctggggcccgaccgg

SEQ ID NO: 1595 - DNA, 23 bp, Homo sapiens
gctgcgacctggggccctacggg

SEQ ID NO: 1596 - DNA, 23 bp, Homo sapiens
gctgcgacctggggctcgacggg

SEQ ID NO: 1597 - DNA, 23 bp, Homo sapiens
gctgcgacctgggtcccgacggg

SEQ ID NO: 1598 - DNA, 23 bp, Homo sapiens
gctgcgaccttgggcccgacggg

SEQ ID NO: 1599 - DNA, 23 bp, Homo sapiens
gctgcgacgtggagccggacggg

SEQ ID NO: 1600 - DNA, 23 bp, Homo sapiens
gctgcgacgtggggcccggcggg

SEQ ID NO: 1601 - DNA, 23 bp, Homo sapiens
gctgcgacgtggggccggatggg

SEQ ID NO: 1602 - DNA, 23 bp, Homo sapiens
gctgggacctggggcccgacggg

SEQ ID NO: 1603 - DNA, 23 bp, Homo sapiens
gctgggcggggctcgggggctgg

SEQ ID NO: 1604 - DNA, 23 bp, Homo sapiens
gctgggctgaccgcggggtcggg

SEQ ID NO: 1605 - DNA, 23 bp, Homo sapiens
gcttgtaaggtgagattctgggg

SEQ ID NO: 1606 - DNA, 23 bp, Homo sapiens
gcttgtacggctgcgacgtgggg

SEQ ID NO: 1607 - DNA, 23 bp, Homo sapiens
gcttgtacttctgcgtctcccgg

SEQ ID NO: 1608 - DNA, 23 bp, Homo sapiens
gcttgtacttttgtgtctcccgg

SEQ ID NO: 1609 - DNA, 23 bp, Homo sapiens
gcttgtgcttctgtgtctcccgg

SEQ ID NO: 1610 - DNA, 23 bp, Homo sapiens
gcttgttcttctgtgtctcccgg

SEQ ID NO: 1611 - DNA, 23 bp, Homo sapiens
ggaaccccgcttcatcgccgtgg

SEQ ID NO: 1612 - DNA, 23 bp, Homo sapiens
ggaacgcagatcctcgttcaggg

SEQ ID NO: 1613 - DNA, 23 bp, Homo sapiens
ggaagaaggaccccacaagttgg

SEQ ID NO: 1614 - DNA, 23 bp, Homo sapiens
ggaagacggctctgggaaaaggg

SEQ ID NO: 1615 - DNA, 23 bp, Homo sapiens
ggaagagttctggtagggaaggg

SEQ ID NO: 1616 - DNA, 23 bp, Homo sapiens
ggaagatggctcccatctcaggg

SEQ ID NO: 1617 - DNA, 23 bp, Homo sapiens
ggaagcctgggggcgaggagggg

SEQ ID NO: 1618 - DNA, 23 bp, Homo sapiens
ggaaggagacgctgcagcgaagg

SEQ ID NO: 1619 - DNA, 23 bp, Homo sapiens
ggaaggagccgcgggcgccctgg

SEQ ID NO: 1620 - DNA, 23 bp, Homo sapiens
ggaaggagccgcgggcgccgtgg

SEQ ID NO: 1621 - DNA, 23 bp, Homo sapiens
ggaaggctccccactgcccttgg

SEQ ID NO: 1622 - DNA, 23 bp, Homo sapiens
ggaaggttccatcccctggcagg

SEQ ID NO: 1623 - DNA, 23 bp, Homo sapiens
ggacaagaggaattatggggcgg

SEQ ID NO: 1624 - DNA, 23 bp, Homo sapiens
ggacacctgatcagtattctagg

SEQ ID NO: 1625 - DNA, 23 bp, Homo sapiens
ggacatttgcttcccacaggtgg

SEQ ID NO: 1626 - DNA, 23 bp, Homo sapiens
ggaccaggagactgaccgagtgg

SEQ ID NO: 1627 - DNA, 23 bp, Homo sapiens
ggacccctgatcagtattatagg

SEQ ID NO: 1628 - DNA, 23 bp, Homo sapiens
ggaccctcagagtcactctctgg

SEQ ID NO: 1629 - DNA, 23 bp, Homo sapiens
ggacctaagctcctggaccgcgg

SEQ ID NO: 1630 - DNA, 23 bp, Homo sapiens
ggacctgagctcccggaccgcgg

SEQ ID NO: 1631 - DNA, 23 bp, Homo sapiens
ggacctgagctcctggatcgcgg

SEQ ID NO: 1632 - DNA, 23 bp, Homo sapiens
ggacctgcgctcttagaccgcgg

SEQ ID NO: 1633 - DNA, 23 bp, Homo sapiens
ggacctgcgctctttgaccgcgg

SEQ ID NO: 1634 - DNA, 23 bp, Homo sapiens
ggacctggtcaagagcccgcagg

SEQ ID NO: 1635 - DNA, 23 bp, Homo sapiens
ggacggagccccgggagccatgg

SEQ ID NO: 1636 - DNA, 23 bp, Homo sapiens
ggacggagccctgggcgccatgg

SEQ ID NO: 1637 - DNA, 23 bp, Homo sapiens
ggacggatgtatcaccgtggtgg

SEQ ID NO: 1638 - DNA, 23 bp, Homo sapiens
ggactccgagacccttgccccgg

SEQ ID NO: 1639 - DNA, 23 bp, Homo sapiens
ggactctccgcggccgggccggg

SEQ ID NO: 1640 - DNA, 23 bp, Homo sapiens
ggacttcagaaccggtactgcgg

SEQ ID NO: 1641 - DNA, 23 bp, Homo sapiens
ggactttagaacctggactgcgg

SEQ ID NO: 1642 - DNA, 23 bp, Homo sapiens
ggagaaacacctcatggagtggg

SEQ ID NO: 1643 - DNA, 23 bp, Homo sapiens
ggagaaatacgtcatggagtggg

SEQ ID NO: 1644 - DNA, 23 bp, Homo sapiens
ggagaacgggaaggagacgctgg

SEQ ID NO: 1645 - DNA, 23 bp, Homo sapiens
ggagaagaagtgaaactcttggg

SEQ ID NO: 1646 - DNA, 23 bp, Homo sapiens
ggagacccgggccgtacgtcggg

SEQ ID NO: 1647 - DNA, 23 bp, Homo sapiens
ggagacgcccgtcgggccccagg

SEQ ID NO: 1648 - DNA, 23 bp, Homo sapiens
ggagactgaccgagtggacctgg

SEQ ID NO: 1649 - DNA, 23 bp, Homo sapiens
ggagagggagcctgggggcgagg

SEQ ID NO: 1650 - DNA, 23 bp, Homo sapiens
ggagatgtagaaatacctcatgg

SEQ ID NO: 1651 - DNA, 23 bp, Homo sapiens
ggagcaacggagagcctacctgg

SEQ ID NO: 1652 - DNA, 23 bp, Homo sapiens
ggagcagcggagaacctacctgg

SEQ ID NO: 1653 - DNA, 23 bp, Homo sapiens
ggagcagctaagagcctacctgg

SEQ ID NO: 1654 - DNA, 23 bp, Homo sapiens
ggagcagctgagagcctaccggg

SEQ ID NO: 1655 - DNA, 23 bp, Homo sapiens
ggagcagctgagagcctgcctgg

SEQ ID NO: 1656 - DNA, 23 bp, Homo sapiens
ggagcagtgcagagcctacctgg

SEQ ID NO: 1657 - DNA, 23 bp, Homo sapiens
ggagcagtggagagcccacctgg

SEQ ID NO: 1658 - DNA, 23 bp, Homo sapiens
ggagcagtggagagtctacctgg

SEQ ID NO: 1659 - DNA, 23 bp, Homo sapiens
ggagcagttgaaagcctacctgg

SEQ ID NO: 1660 - DNA, 23 bp, Homo sapiens
ggagccatggatagagcaggagg

SEQ ID NO: 1661 - DNA, 23 bp, Homo sapiens
ggagccccgcggcttcggggtgg

SEQ ID NO: 1662 - DNA, 23 bp, Homo sapiens
ggagccccgcttcatcgctgtgg

SEQ ID NO: 1663 - DNA, 23 bp, Homo sapiens
ggagccccgcttcattaccgtgg

SEQ ID NO: 1664 - DNA, 23 bp, Homo sapiens
ggagccctgcttcatcgccgtgg

SEQ ID NO: 1665 - DNA, 23 bp, Homo sapiens
ggagcccttcagcagggtcgggg

SEQ ID NO: 1666 - DNA, 23 bp, Homo sapiens
ggagccgcaggcgccgtgggtgg

SEQ ID NO: 1667 - DNA, 23 bp, Homo sapiens
ggagccgcgggagccgtggatgg

SEQ ID NO: 1668 - DNA, 23 bp, Homo sapiens
ggagccgtggatggagcaggagg

SEQ ID NO: 1669 - DNA, 23 bp, Homo sapiens
ggagcctgggggcgaggagtggg

SEQ ID NO: 1670 - DNA, 23 bp, Homo sapiens
ggagcgcaggtcctcgtccaggg

SEQ ID NO: 1671 - DNA, 23 bp, Homo sapiens
ggagcgcaggtcctcgttcacgg

SEQ ID NO: 1672 - DNA, 23 bp, Homo sapiens
ggagctcaggtcctcgttcaagg

SEQ ID NO: 1673 - DNA, 23 bp, Homo sapiens
ggagctccgcttcatcgcagtgg

SEQ ID NO: 1674 - DNA, 23 bp, Homo sapiens
ggagcttaggtcctcgttcaggg

SEQ ID NO: 1675 - DNA, 23 bp, Homo sapiens
ggaggactagacccaggacacgg

SEQ ID NO: 1676 - DNA, 23 bp, Homo sapiens
ggaggaggggccggagtattggg

SEQ ID NO: 1677 - DNA, 23 bp, Homo sapiens
ggaggcgcccgtagggccccagg

SEQ ID NO: 1678 - DNA, 23 bp, Homo sapiens
ggaggcgcccgtcgagccccagg

SEQ ID NO: 1679 - DNA, 23 bp, Homo sapiens
ggaggcgcccgtcgggacccagg

SEQ ID NO: 1680 - DNA, 23 bp, Homo sapiens
ggaggcgcccgtcgggcccaagg

SEQ ID NO: 1681 - DNA, 23 bp, Homo sapiens
ggaggcgcccgtcgggccccggg

SEQ ID NO: 1682 - DNA, 23 bp, Homo sapiens
ggaggcgccggtcgggccccagg

SEQ ID NO: 1683 - DNA, 23 bp, Homo sapiens
ggagggcaggtcctcgttcaggg

SEQ ID NO: 1684 - DNA, 23 bp, Homo sapiens
ggagggcgatattatagtgttgg

SEQ ID NO: 1685 - DNA, 23 bp, Homo sapiens
ggaggggcccgtcgggccccagg

SEQ ID NO: 1686 - DNA, 23 bp, Homo sapiens
ggaggggccggacggagtattgg

SEQ ID NO: 1687 - DNA, 23 bp, Homo sapiens
ggagtaggagcctgggggcgagg

SEQ ID NO: 1688 - DNA, 23 bp, Homo sapiens
ggagtcccgcggcttcggggcgg

SEQ ID NO: 1689 - DNA, 23 bp, Homo sapiens
ggagtgagagcctggggaccagg

SEQ ID NO: 1690 - DNA, 23 bp, Homo sapiens
ggagtggaagcctgggggcgagg

SEQ ID NO: 1691 - DNA, 23 bp, Homo sapiens
ggagtggctccgcagatatctgg

SEQ ID NO: 1692 - DNA, 23 bp, Homo sapiens
ggagtgggaacctgggggcgagg

SEQ ID NO: 1693 - DNA, 23 bp, Homo sapiens
ggagtgggagactgggggcgagg

SEQ ID NO: 1694 - DNA, 23 bp, Homo sapiens
ggagtgggagactgggggtgagg

SEQ ID NO: 1695 - DNA, 23 bp, Homo sapiens
ggagtgggagcctgggagcgagg

SEQ ID NO: 1696 - DNA, 23 bp, Homo sapiens
ggagtgggaggctgggggcgagg

SEQ ID NO: 1697 - DNA, 23 bp, Homo sapiens
ggatagggaggaccagacccagg

SEQ ID NO: 1698 - DNA, 23 bp, Homo sapiens
ggatctcggaccctgagactcgg

SEQ ID NO: 1699 - DNA, 23 bp, Homo sapiens
ggatgacatcgccctgaacgagg

SEQ ID NO: 1700 - DNA, 23 bp, Homo sapiens
ggatgacatctctgaggaaatgg

SEQ ID NO: 1701 - DNA, 23 bp, Homo sapiens
ggatggagccccgggcgccatgg

SEQ ID NO: 1702 - DNA, 23 bp, Homo sapiens
ggatggcaaggaccaaactcagg

SEQ ID NO: 1703 - DNA, 23 bp, Homo sapiens
ggatggcctcccacgaggaaggg

SEQ ID NO: 1704 - DNA, 23 bp, Homo sapiens
ggatggcgaggactaaactcagg

SEQ ID NO: 1705 - DNA, 23 bp, Homo sapiens
ggatggcgccctgggcgccatgg

SEQ ID NO: 1706 - DNA, 23 bp, Homo sapiens
ggatggcgtctctgaggaaatgg

SEQ ID NO: 1707 - DNA, 23 bp, Homo sapiens
ggatggggaagaccagacccagg

SEQ ID NO: 1708 - DNA, 23 bp, Homo sapiens
ggatggggaggaccaaattcagg

SEQ ID NO: 1709 - DNA, 23 bp, Homo sapiens
ggatggggaggactagacccagg

SEQ ID NO: 1710 - DNA, 23 bp, Homo sapiens
ggatgtaaagaaatacctcatgg

SEQ ID NO: 1711 - DNA, 23 bp, Homo sapiens
ggatgtaaggctgcgacgtgggg

SEQ ID NO: 1712 - DNA, 23 bp, Homo sapiens
ggatgtacggctgggacctgggg

SEQ ID NO: 1713 - DNA, 23 bp, Homo sapiens
ggatgtatggttgcgacgtgggg

SEQ ID NO: 1714 - DNA, 23 bp, Homo sapiens
ggatgtctggctgcgacccgggg

SEQ ID NO: 1715 - DNA, 23 bp, Homo sapiens
ggatgtggagaaacacctcatgg

SEQ ID NO: 1716 - DNA, 23 bp, Homo sapiens
ggatgtggagaaatacgtcatgg

SEQ ID NO: 1717 - DNA, 23 bp, Homo sapiens
ggatgtgtagaaatacctcatgg

SEQ ID NO: 1718 - DNA, 23 bp, Homo sapiens
ggatgtgtggctgcaacctgggg

SEQ ID NO: 1719 - DNA, 23 bp, Homo sapiens
ggatgtttggctgcgaccttggg

SEQ ID NO: 1720 - DNA, 23 bp, Homo sapiens
ggattacaacgccctgaatgagg

SEQ ID NO: 1721 - DNA, 23 bp, Homo sapiens
ggattacatagccctgaacgagg

SEQ ID NO: 1722 - DNA, 23 bp, Homo sapiens
ggattacatcgccctggacgagg

SEQ ID NO: 1723 - DNA, 23 bp, Homo sapiens
ggattacatcgccgtgaacgagg

SEQ ID NO: 1724 - DNA, 23 bp, Homo sapiens
ggcacctcctgctctatccatgg

SEQ ID NO: 1725 - DNA, 23 bp, Homo sapiens
ggcagggccatgtgattttaggg

SEQ ID NO: 1726 - DNA, 23 bp, Homo sapiens
ggcataatgtgaggagggtgggg

SEQ ID NO: 1727 - DNA, 23 bp, Homo sapiens
ggccagccccggagatctacagg

SEQ ID NO: 1728 - DNA, 23 bp, Homo sapiens
ggccagggtctcacatcatccgg

SEQ ID NO: 1729 - DNA, 23 bp, Homo sapiens
ggccagggtctcacatccagagg

SEQ ID NO: 1730 - DNA, 23 bp, Homo sapiens
ggccatcccgggcgatctatagg

SEQ ID NO: 1731 - DNA, 23 bp, Homo sapiens
ggccatgggcttctaccctgcgg

SEQ ID NO: 1732 - DNA, 23 bp, Homo sapiens
ggcccctcctgctccatccacgg

SEQ ID NO: 1733 - DNA, 23 bp, Homo sapiens
ggcccctcctgctctatccaggg

SEQ ID NO: 1734 - DNA, 23 bp, Homo sapiens
ggcccctccttctccacccacgg

SEQ ID NO: 1735 - DNA, 23 bp, Homo sapiens
ggcccgtccgtggggaatgaggg

SEQ ID NO: 1736 - DNA, 23 bp, Homo sapiens
ggccctgaccgagacctgggcgg

SEQ ID NO: 1737 - DNA, 23 bp, Homo sapiens
ggccctgagcttctaccctgtgg

SEQ ID NO: 1738 - DNA, 23 bp, Homo sapiens
ggccctgggcttctaccctgtgg

SEQ ID NO: 1739 - DNA, 23 bp, Homo sapiens
ggccctgggtttctaccctgtgg

SEQ ID NO: 1740 - DNA, 23 bp, Homo sapiens
ggccctgtgcttctaccctgcgg

SEQ ID NO: 1741 - DNA, 23 bp, Homo sapiens
ggccgcctccaacttgggctggg

SEQ ID NO: 1742 - DNA, 23 bp, Homo sapiens
ggccgcctccaacttgtgctggg

SEQ ID NO: 1743 - DNA, 23 bp, Homo sapiens
ggccgcctcccacttacgctggg

SEQ ID NO: 1744 - DNA, 23 bp, Homo sapiens
ggccgcctcccacttgcgctcgg

SEQ ID NO: 1745 - DNA, 23 bp, Homo sapiens
ggccgcctcccacttgggctggg

SEQ ID NO: 1746 - DNA, 23 bp, Homo sapiens
ggccgcctcccatttgcgctggg

SEQ ID NO: 1747 - DNA, 23 bp, Homo sapiens
ggcctctatggagaggagcgagg

SEQ ID NO: 1748 - DNA, 23 bp, Homo sapiens
ggcctctgcggagaggagggagg

SEQ ID NO: 1749 - DNA, 23 bp, Homo sapiens
ggcctctgctgagaggagcgagg

SEQ ID NO: 1750 - DNA, 23 bp, Homo sapiens
ggcgaccccggccgtacgtgggg

SEQ ID NO: 1751 - DNA, 23 bp, Homo sapiens
ggcgcaggcctcatcccccacgg

SEQ ID NO: 1752 - DNA, 23 bp, Homo sapiens
ggcgccatgacggccattctcgg

SEQ ID NO: 1753 - DNA, 23 bp, Homo sapiens
ggcgccatgatggccatcctcgg

SEQ ID NO: 1754 - DNA, 23 bp, Homo sapiens
ggcgcccagggcgccatcctcgg

SEQ ID NO: 1755 - DNA, 23 bp, Homo sapiens
ggcgcccagggctccgtcctcgg

SEQ ID NO: 1756 - DNA, 23 bp, Homo sapiens
ggcgcccgcggctcccccctcgg

SEQ ID NO: 1757 - DNA, 23 bp, Homo sapiens
ggcgcccggggctccatcctcgg

SEQ ID NO: 1758 - DNA, 23 bp, Homo sapiens
ggcgccctggatagagcaggagg

SEQ ID NO: 1759 - DNA, 23 bp, Homo sapiens
ggcgccgtgggtggagaaggagg

SEQ ID NO: 1760 - DNA, 23 bp, Homo sapiens
ggcgcctgcggctcccctcttgg

SEQ ID NO: 1761 - DNA, 23 bp, Homo sapiens
ggcgcggtggatagagcaggagg

SEQ ID NO: 1762 - DNA, 23 bp, Homo sapiens
ggcggcccgtatggcggagcagg

SEQ ID NO: 1763 - DNA, 23 bp, Homo sapiens
ggcggggcggggcggggccgggg

SEQ ID NO: 1764 - DNA, 23 bp, Homo sapiens
ggcggggggggggtggggtgggg

SEQ ID NO: 1765 - DNA, 23 bp, Homo sapiens
ggcgggtctgggggggggggggg

SEQ ID NO: 1766 - DNA, 23 bp, Homo sapiens
ggcggtgtagaaatacctcaagg

SEQ ID NO: 1767 - DNA, 23 bp, Homo sapiens
ggcggtgtagaaatacttcatgg

SEQ ID NO: 1768 - DNA, 23 bp, Homo sapiens
ggcgtctctgaggaaatggaggg

SEQ ID NO: 1769 - DNA, 23 bp, Homo sapiens
ggctacaaccagagcgaggccgg

SEQ ID NO: 1770 - DNA, 23 bp, Homo sapiens
ggctcccatctcagggtgagggg

SEQ ID NO: 1771 - DNA, 23 bp, Homo sapiens
ggctcccctctcggactcgcggg

SEQ ID NO: 1772 - DNA, 23 bp, Homo sapiens
ggctccccttctcggactcgcgg

SEQ ID NO: 1773 - DNA, 23 bp, Homo sapiens
ggctcccggggctccgtcctcgg

SEQ ID NO: 1774 - DNA, 23 bp, Homo sapiens
ggctccgagacccttgtcccggg

SEQ ID NO: 1775 - DNA, 23 bp, Homo sapiens
ggctgatgcctgaggtcctttgg

SEQ ID NO: 1776 - DNA, 23 bp, Homo sapiens
ggctgcaacctggggcccgacgg

SEQ ID NO: 1777 - DNA, 23 bp, Homo sapiens
ggctgcctcccacttgcgctggg

SEQ ID NO: 1778 - DNA, 23 bp, Homo sapiens
ggctgcgacatggggccggacgg

SEQ ID NO: 1779 - DNA, 23 bp, Homo sapiens
ggctgcgacccggggcccgacgg

SEQ ID NO: 1780 - DNA, 23 bp, Homo sapiens
ggctgcgacctgggcccgacggg

SEQ ID NO: 1781 - DNA, 23 bp, Homo sapiens
ggctgcgacctggggccctacgg

SEQ ID NO: 1782 - DNA, 23 bp, Homo sapiens
ggctgcgacctggggctcgacgg

SEQ ID NO: 1783 - DNA, 23 bp, Homo sapiens
ggctgcgacctgggtcccgacgg

SEQ ID NO: 1784 - DNA, 23 bp, Homo sapiens
ggctgcgaccttgggcccgacgg

SEQ ID NO: 1785 - DNA, 23 bp, Homo sapiens
ggctgcgacgtggagccggacgg

SEQ ID NO: 1786 - DNA, 23 bp, Homo sapiens
ggctgcgacgtggggcccggcgg

SEQ ID NO: 1787 - DNA, 23 bp, Homo sapiens
ggctgcgacgtggggccggatgg

SEQ ID NO: 1788 - DNA, 23 bp, Homo sapiens
ggctggcctcccacaagaaaggg

SEQ ID NO: 1789 - DNA, 23 bp, Homo sapiens
ggctgggacctggggcccgacgg

SEQ ID NO: 1790 - DNA, 23 bp, Homo sapiens
ggctgggctgaccgcggggtcgg

SEQ ID NO: 1791 - DNA, 23 bp, Homo sapiens
ggctgtcgaacctcacgaactgg

SEQ ID NO: 1792 - DNA, 23 bp, Homo sapiens
ggcttacatcgccctgaacgagg

SEQ ID NO: 1793 - DNA, 23 bp, Homo sapiens
gggaaacggcctctgctgagagg

SEQ ID NO: 1794 - DNA, 23 bp, Homo sapiens
gggaacctgggggcgaggagggg

SEQ ID NO: 1795 - DNA, 23 bp, Homo sapiens
gggaagacggctctgggaaaagg

SEQ ID NO: 1796 - DNA, 23 bp, Homo sapiens
gggaagatggctcccatctcagg

SEQ ID NO: 1797 - DNA, 23 bp, Homo sapiens
gggaagcaaatgtcctgtgaggg

SEQ ID NO: 1798 - DNA, 23 bp, Homo sapiens
gggaagccgcgcagggaggaggg

SEQ ID NO: 1799 - DNA, 23 bp, Homo sapiens
gggaagcggcctctatggagagg

SEQ ID NO: 1800 - DNA, 23 bp, Homo sapiens
gggaaggctccccactgccccgg

SEQ ID NO: 1801 - DNA, 23 bp, Homo sapiens
gggacactccagcatgcatgtgg

SEQ ID NO: 1802 - DNA, 23 bp, Homo sapiens
gggacagtggactgggaagacgg

SEQ ID NO: 1803 - DNA, 23 bp, Homo sapiens
gggaccgcggcaacgctgattgg

SEQ ID NO: 1804 - DNA, 23 bp, Homo sapiens
gggacgcgtcacgagtatcccgg

SEQ ID NO: 1805 - DNA, 23 bp, Homo sapiens
gggactctccgcggccgggccgg

SEQ ID NO: 1806 - DNA, 23 bp, Homo sapiens
gggagaagaagtgaaactcttgg

SEQ ID NO: 1807 - DNA, 23 bp, Homo sapiens
gggagactccgcccatgaggcgg

SEQ ID NO: 1808 - DNA, 23 bp, Homo sapiens
gggagactgggggcgaggagggg

SEQ ID NO: 1809 - DNA, 23 bp, Homo sapiens
gggagactgggggtgaggagggg

SEQ ID NO: 1810 - DNA, 23 bp, Homo sapiens
gggagcctgggagcgaggagggg

SEQ ID NO: 1811 - DNA, 23 bp, Homo sapiens
gggagctcaggtcctcgttcagg

SEQ ID NO: 1812 - DNA, 23 bp, Homo sapiens
gggagctgggcggggctcggggg

SEQ ID NO: 1813 - DNA, 23 bp, Homo sapiens
gggaggcgccccgtggtccctgg

SEQ ID NO: 1814 - DNA, 23 bp, Homo sapiens
gggaggcgccctgtggcccctgg

SEQ ID NO: 1815 - DNA, 23 bp, Homo sapiens
gggaggctgggggcgaggagggg

SEQ ID NO: 1816 - DNA, 23 bp, Homo sapiens
gggagggcctgtgcgtggagtgg

SEQ ID NO: 1817 - DNA, 23 bp, Homo sapiens
gggaggggccctcccggcgaggg

SEQ ID NO: 1818 - DNA, 23 bp, Homo sapiens
gggagggggcagagggggaaagg

SEQ ID NO: 1819 - DNA, 23 bp, Homo sapiens
gggatggcctcccacgaggaagg

SEQ ID NO: 1820 - DNA, 23 bp, Homo sapiens
gggcagagggggaaaggcctggg

SEQ ID NO: 1821 - DNA, 23 bp, Homo sapiens
gggcaggatcaggaaacacaagg

SEQ ID NO: 1822 - DNA, 23 bp, Homo sapiens
gggccgcctccaacttgggctgg

SEQ ID NO: 1823 - DNA, 23 bp, Homo sapiens
gggccgcctccaacttgtgctgg

SEQ ID NO: 1824 - DNA, 23 bp, Homo sapiens
gggccgcctcccacttacgctgg

SEQ ID NO: 1825 - DNA, 23 bp, Homo sapiens
gggccgcctcccacttgggctgg

SEQ ID NO: 1826 - DNA, 23 bp, Homo sapiens
gggccgcctcccatttgcgctgg

SEQ ID NO: 1827 - DNA, 23 bp, Homo sapiens
gggcctgagaggaaaagtcacgg

SEQ ID NO: 1828 - DNA, 23 bp, Homo sapiens
gggcgaccccggccgtacgtggg

SEQ ID NO: 1829 - DNA, 23 bp, Homo sapiens
gggcgccgtgggtggaggagggg

SEQ ID NO: 1830 - DNA, 23 bp, Homo sapiens
gggcgcctcctccgcgggtatgg

SEQ ID NO: 1831 - DNA, 23 bp, Homo sapiens
gggcggggcggggcggggccggg

SEQ ID NO: 1832 - DNA, 23 bp, Homo sapiens
gggcggggctcgggggagctggg

SEQ ID NO: 1833 - DNA, 23 bp, Homo sapiens
gggcggggggggggtggggtggg

SEQ ID NO: 1834 - DNA, 23 bp, Homo sapiens
gggcgggtctcagccactcctgg

SEQ ID NO: 1835 - DNA, 23 bp, Homo sapiens
gggctccatcctcggactcgcgg

SEQ ID NO: 1836 - DNA, 23 bp, Homo sapiens
gggctccccacggccgggccggg

SEQ ID NO: 1837 - DNA, 23 bp, Homo sapiens
gggctccccgcagccgggccggg

SEQ ID NO: 1838 - DNA, 23 bp, Homo sapiens
gggctccccgctgccgggccggg

SEQ ID NO: 1839 - DNA, 23 bp, Homo sapiens
gggctcccctctcggacttgcgg

SEQ ID NO: 1840 - DNA, 23 bp, Homo sapiens
gggctccgagacccttgtcccgg

SEQ ID NO: 1841 - DNA, 23 bp, Homo sapiens
gggctcctcgcggccgggccggg

SEQ ID NO: 1842 - DNA, 23 bp, Homo sapiens
gggctcgggggagctgggcgggg

SEQ ID NO: 1843 - DNA, 23 bp, Homo sapiens
gggctctccgcggccgggccagg

SEQ ID NO: 1844 - DNA, 23 bp, Homo sapiens
gggctctccgcggccgggcccgg

SEQ ID NO: 1845 - DNA, 23 bp, Homo sapiens
gggctctccgcggcctggccggg

SEQ ID NO: 1846 - DNA, 23 bp, Homo sapiens
gggctgcctcccacttgcgctgg

SEQ ID NO: 1847 - DNA, 23 bp, Homo sapiens
gggctggcctcccacaagaaagg

SEQ ID NO: 1848 - DNA, 23 bp, Homo sapiens
gggctgggtgatctgagccgcgg

SEQ ID NO: 1849 - DNA, 23 bp, Homo sapiens
ggggactgggctgaccacggggg

SEQ ID NO: 1850 - DNA, 23 bp, Homo sapiens
ggggactgggctgaccgcgaggg

SEQ ID NO: 1851 - DNA, 23 bp, Homo sapiens
ggggagccgcgccgggaggtggg

SEQ ID NO: 1852 - DNA, 23 bp, Homo sapiens
ggggagccgcgccggtaggaggg

SEQ ID NO: 1853 - DNA, 23 bp, Homo sapiens
ggggagcggcgcagggaggaggg

SEQ ID NO: 1854 - DNA, 23 bp, Homo sapiens
ggggagcggcgcagggaggtggg

SEQ ID NO: 1855 - DNA, 23 bp, Homo sapiens
ggggagctgggcggggctcgggg

SEQ ID NO: 1856 - DNA, 23 bp, Homo sapiens
ggggatgaggcctgcgccccggg

SEQ ID NO: 1857 - DNA, 23 bp, Homo sapiens
ggggcagagggggaaaggcctgg

SEQ ID NO: 1858 - DNA, 23 bp, Homo sapiens
ggggccagagtattgggaccggg

SEQ ID NO: 1859 - DNA, 23 bp, Homo sapiens
ggggccccgaccctgctgaaggg

SEQ ID NO: 1860 - DNA, 23 bp, Homo sapiens
ggggccggagtactgggaccggg

SEQ ID NO: 1861 - DNA, 23 bp, Homo sapiens
ggggccggagtattaggaccggg

SEQ ID NO: 1862 - DNA, 23 bp, Homo sapiens
ggggccggagtgttgggaccggg

SEQ ID NO: 1863 - DNA, 23 bp, Homo sapiens
ggggcgaccccggccgtacgtgg

SEQ ID NO: 1864 - DNA, 23 bp, Homo sapiens
ggggcgccatgacggccatcggg

SEQ ID NO: 1865 - DNA, 23 bp, Homo sapiens
ggggcggggccggggggacgggg

SEQ ID NO: 1866 - DNA, 23 bp, Homo sapiens
ggggcggggcggggcggggccgg

SEQ ID NO: 1867 - DNA, 23 bp, Homo sapiens
ggggcggggttcgggggacgggg

SEQ ID NO: 1868 - DNA, 23 bp, Homo sapiens
ggggctccccacggccgggccgg

SEQ ID NO: 1869 - DNA, 23 bp, Homo sapiens
ggggctccccgcagccgggccgg

SEQ ID NO: 1870 - DNA, 23 bp, Homo sapiens
ggggctccccgctgccgggccgg

SEQ ID NO: 1871 - DNA, 23 bp, Homo sapiens
ggggctcctcgcggccgggccgg

SEQ ID NO: 1872 - DNA, 23 bp, Homo sapiens
ggggctcgggggagctgggcggg

SEQ ID NO: 1873 - DNA, 23 bp, Homo sapiens
ggggctctccgcggcctggccgg

SEQ ID NO: 1874 - DNA, 23 bp, Homo sapiens
ggggctggagtattgggaccggg

SEQ ID NO: 1875 - DNA, 23 bp, Homo sapiens
ggggctggggcggggttcggggg

SEQ ID NO: 1876 - DNA, 23 bp, Homo sapiens
gggggacggggctggccgcgggg

SEQ ID NO: 1877 - DNA, 23 bp, Homo sapiens
gggggactgggctgaccacgggg

SEQ ID NO: 1878 - DNA, 23 bp, Homo sapiens
gggggactgggctgaccgcgagg

SEQ ID NO: 1879 - DNA, 23 bp, Homo sapiens
gggggagccgcgggcgccgtggg

SEQ ID NO: 1880 - DNA, 23 bp, Homo sapiens
gggggagctgggcggggctcggg

SEQ ID NO: 1881 - DNA, 23 bp, Homo sapiens
gggggatgaggcctgcgccccgg

SEQ ID NO: 1882 - DNA, 23 bp, Homo sapiens
ggggggagccgcgggcgccgtgg

SEQ ID NO: 1883 - DNA, 23 bp, Homo sapiens
ggggggggggcagaggggaaagg

SEQ ID NO: 1884 - DNA, 23 bp, Homo sapiens
ggggggggggtggggtggggagg

SEQ ID NO: 1885 - DNA, 23 bp, Homo sapiens
ggggtcctgacctgcgccaccgg

SEQ ID NO: 1886 - DNA, 23 bp, Homo sapiens
ggggtcgctccgcagatacctgg

SEQ ID NO: 1887 - DNA, 23 bp, Homo sapiens
ggggtcgtgacctgcgccccagg

SEQ ID NO: 1888 - DNA, 23 bp, Homo sapiens
ggggtctagagtgggcagggggg

SEQ ID NO: 1889 - DNA, 23 bp, Homo sapiens
ggggtggcgggtctggggggggg

SEQ ID NO: 1890 - DNA, 23 bp, Homo sapiens
ggggttccccgcggccgggccgg

SEQ ID NO: 1891 - DNA, 23 bp, Homo sapiens
gggtcacgtgtgtctttgcgggg

SEQ ID NO: 1892 - DNA, 23 bp, Homo sapiens
gggtctccttcccgttctccagg

SEQ ID NO: 1893 - DNA, 23 bp, Homo sapiens
gggtgaagggatgaagggtgggg

SEQ ID NO: 1894 - DNA, 23 bp, Homo sapiens
gggtggcgggtctgggggggggg

SEQ ID NO: 1895 - DNA, 23 bp, Homo sapiens
gggtggggagggggcagaggggg

SEQ ID NO: 1896 - DNA, 23 bp, Homo sapiens
gggttccccgcggccgggccggg

SEQ ID NO: 1897 - DNA, 23 bp, Homo sapiens
gggttttgttgtcccactggggg

SEQ ID NO: 1898 - DNA, 23 bp, Homo sapiens
ggtactgcggagacgctgattgg

SEQ ID NO: 1899 - DNA, 23 bp, Homo sapiens
ggtagaacaaaaaaaatacctgg

SEQ ID NO: 1900 - DNA, 23 bp, Homo sapiens
ggtagggaaggggtggggagtgg

SEQ ID NO: 1901 - DNA, 23 bp, Homo sapiens
ggtccactcggtcagtctcctgg

SEQ ID NO: 1902 - DNA, 23 bp, Homo sapiens
ggtccatgcggcgggagcagcgg

SEQ ID NO: 1903 - DNA, 23 bp, Homo sapiens
ggtcccagccgtacatcctctgg

SEQ ID NO: 1904 - DNA, 23 bp, Homo sapiens
ggtcccgcggcctcagggggcgg

SEQ ID NO: 1905 - DNA, 23 bp, Homo sapiens
ggtccctgacgacagacctcagg

SEQ ID NO: 1906 - DNA, 23 bp, Homo sapiens
ggtccgagatccgccccctgagg

SEQ ID NO: 1907 - DNA, 23 bp, Homo sapiens
ggtcctttggatattgtgtttgg

SEQ ID NO: 1908 - DNA, 23 bp, Homo sapiens
ggtcgcagccatacatccgctgg

SEQ ID NO: 1909 - DNA, 23 bp, Homo sapiens
ggtcgcagccatacatcctccgg

SEQ ID NO: 1910 - DNA, 23 bp, Homo sapiens
ggtcgcagccgtacatgctctgg

SEQ ID NO: 1911 - DNA, 23 bp, Homo sapiens
ggtctgcagtcacacattactgg

SEQ ID NO: 1912 - DNA, 23 bp, Homo sapiens
ggtgagacccctcactgtgatgg

SEQ ID NO: 1913 - DNA, 23 bp, Homo sapiens
ggtgcccaaggctgctgcagggg

SEQ ID NO: 1914 - DNA, 23 bp, Homo sapiens
ggtgccggaggattgggaccggg

SEQ ID NO: 1915 - DNA, 23 bp, Homo sapiens
ggtgctctccgcggccaggccgg

SEQ ID NO: 1916 - DNA, 23 bp, Homo sapiens
ggtggacatgggggtggggtggg

SEQ ID NO: 1917 - DNA, 23 bp, Homo sapiens
ggtggcgggtctggggggggggg

SEQ ID NO: 1918 - DNA, 23 bp, Homo sapiens
ggtggggtggcgggtctgggggg

SEQ ID NO: 1919 - DNA, 23 bp, Homo sapiens
ggtgggtgagctcctccacacgg

SEQ ID NO: 1920 - DNA, 23 bp, Homo sapiens
ggtggtcatatgtgtcttggggg

SEQ ID NO: 1921 - DNA, 23 bp, Homo sapiens
ggtggtggtcatatgtgtcttgg

SEQ ID NO: 1922 - DNA, 23 bp, Homo sapiens
ggtgtagatacctcatggagtgg

SEQ ID NO: 1923 - DNA, 23 bp, Homo sapiens
ggtgtggctccgcagatacctgg

SEQ ID NO: 1924 - DNA, 23 bp, Homo sapiens
ggttagtcatatgcgttttgggg

SEQ ID NO: 1925 - DNA, 23 bp, Homo sapiens
ggttccatcccctgcaggcttgg

SEQ ID NO: 1926 - DNA, 23 bp, Homo sapiens
ggttccatctcctgctcgcctgg

SEQ ID NO: 1927 - DNA, 23 bp, Homo sapiens
ggttctatctcctgcaggtctgg

SEQ ID NO: 1928 - DNA, 23 bp, Homo sapiens
ggttctatctcctgccggtctgg

SEQ ID NO: 1929 - DNA, 23 bp, Homo sapiens
ggttgcagccacacatccactgg

SEQ ID NO: 1930 - DNA, 23 bp, Homo sapiens
ggttgcgacgtggggccggacgg

SEQ ID NO: 1931 - DNA, 23 bp, Homo sapiens
gtaaagtgactcaaaagtgctgg

SEQ ID NO: 1932 - DNA, 23 bp, Homo sapiens
gtaacccactgagatgaagcggg

SEQ ID NO: 1933 - DNA, 23 bp, Homo sapiens
gtaagccttgccgtcgtaggcgg

SEQ ID NO: 1934 - DNA, 23 bp, Homo sapiens
gtaaggctgcgacgtggggccgg

SEQ ID NO: 1935 - DNA, 23 bp, Homo sapiens
gtaagtgatgacattctgaacgg

SEQ ID NO: 1936 - DNA, 23 bp, Homo sapiens
gtaatccttgccgtcctaggcgg

SEQ ID NO: 1937 - DNA, 23 bp, Homo sapiens
gtaatccttgccgtcgcaggcgg

SEQ ID NO: 1938 - DNA, 23 bp, Homo sapiens
gtaatccttgccgtcttaggcgg

SEQ ID NO: 1939 - DNA, 23 bp, Homo sapiens
gtacggctgcgacctggggccgg

SEQ ID NO: 1940 - DNA, 23 bp, Homo sapiens
gtacgtctgtgtgttggtcttgg

SEQ ID NO: 1941 - DNA, 23 bp, Homo sapiens
gtagaaatacctcaaggagtggg

SEQ ID NO: 1942 - DNA, 23 bp, Homo sapiens
gtagaaatacctcatgaagtggg

SEQ ID NO: 1943 - DNA, 23 bp, Homo sapiens
gtagaaatacctcatggagaggg

SEQ ID NO: 1944 - DNA, 23 bp, Homo sapiens
gtagaaatacctcatggagtagg

SEQ ID NO: 1945 - DNA, 23 bp, Homo sapiens
gtagcccacagcgatgaagcggg

SEQ ID NO: 1946 - DNA, 23 bp, Homo sapiens
gtagcccacggcgatgaagcagg

SEQ ID NO: 1947 - DNA, 23 bp, Homo sapiens
gtagcccacggtaatgaagcggg

SEQ ID NO: 1948 - DNA, 23 bp, Homo sapiens
gtagcccactgagacgaagcggg

SEQ ID NO: 1949 - DNA, 23 bp, Homo sapiens
gtagcgcactgagatgaagcggg

SEQ ID NO: 1950 - DNA, 23 bp, Homo sapiens
gtaggaggaagagttctggtagg

SEQ ID NO: 1951 - DNA, 23 bp, Homo sapiens
gtagggaaggggtggggagtggg

SEQ ID NO: 1952 - DNA, 23 bp, Homo sapiens
gtatctacaccgccgtgtcccgg

SEQ ID NO: 1953 - DNA, 23 bp, Homo sapiens
gtatggctgcgacatggggccgg

SEQ ID NO: 1954 - DNA, 23 bp, Homo sapiens
gtatggctgcgacgtggagccgg

SEQ ID NO: 1955 - DNA, 23 bp, Homo sapiens
gtatggttgcgacgtggggccgg

SEQ ID NO: 1956 - DNA, 23 bp, Homo sapiens
gtattcgagggatcgtcttccgg

SEQ ID NO: 1957 - DNA, 23 bp, Homo sapiens
gtcacgagtatcccggaagaagg

SEQ ID NO: 1958 - DNA, 23 bp, Homo sapiens
gtcactcaccggcctcgctccgg

SEQ ID NO: 1959 - DNA, 23 bp, Homo sapiens
gtcactcaccggtctcgctctgg

SEQ ID NO: 1960 - DNA, 23 bp, Homo sapiens
gtcactcaccgtcctcgctccgg

SEQ ID NO: 1961 - DNA, 23 bp, Homo sapiens
gtcactcacggtcctcgctctgg

SEQ ID NO: 1962 - DNA, 23 bp, Homo sapiens
gtcagtctgtgtgttggtcttgg

SEQ ID NO: 1963 - DNA, 23 bp, Homo sapiens
gtccctataatactgatcagggg

SEQ ID NO: 1964 - DNA, 23 bp, Homo sapiens
gtcctccccatcccgctgtcagg

SEQ ID NO: 1965 - DNA, 23 bp, Homo sapiens
gtcctccctatcccgctgccagg

SEQ ID NO: 1966 - DNA, 23 bp, Homo sapiens
gtcctcgccatcccgctaccagg

SEQ ID NO: 1967 - DNA, 23 bp, Homo sapiens
gtccttgccatcccgctgccagg

SEQ ID NO: 1968 - DNA, 23 bp, Homo sapiens
gtcctttggatattgtgtttggg

SEQ ID NO: 1969 - DNA, 23 bp, Homo sapiens
gtcggggctggggcggggttcgg

SEQ ID NO: 1970 - DNA, 23 bp, Homo sapiens
gtctagagtgggcaggggggtgg

SEQ ID NO: 1971 - DNA, 23 bp, Homo sapiens
gtctagagtgggcgggggggggg

SEQ ID NO: 1972 - DNA, 23 bp, Homo sapiens
gtctcccggtcccaacactccgg

SEQ ID NO: 1973 - DNA, 23 bp, Homo sapiens
gtctcccggtcccaatactctgg

SEQ ID NO: 1974 - DNA, 23 bp, Homo sapiens
gtctcccggtcccaatcctccgg

SEQ ID NO: 1975 - DNA, 23 bp, Homo sapiens
gtctcccggtcccagtactccgg

SEQ ID NO: 1976 - DNA, 23 bp, Homo sapiens
gtctcccggtcctaatactccgg

SEQ ID NO: 1977 - DNA, 23 bp, Homo sapiens
gtctcggagccccgcggcttcgg

SEQ ID NO: 1978 - DNA, 23 bp, Homo sapiens
gtctggagggtgtgagaccctgg

SEQ ID NO: 1979 - DNA, 23 bp, Homo sapiens
gtcttccccatcccgctgccagg

SEQ ID NO: 1980 - DNA, 23 bp, Homo sapiens
gtcttgaagatctgtgtgttcgg

SEQ ID NO: 1981 - DNA, 23 bp, Homo sapiens
gtgaacctgcggcaactgcgcgg

SEQ ID NO: 1982 - DNA, 23 bp, Homo sapiens
gtgaccccggccggtggcgcagg

SEQ ID NO: 1983 - DNA, 23 bp, Homo sapiens
gtgactggtgactttagaaccgg

SEQ ID NO: 1984 - DNA, 23 bp, Homo sapiens
gtgagcctgcggaaactgcgcgg

SEQ ID NO: 1985 - DNA, 23 bp, Homo sapiens
gtgagcctgcggaacctgcttgg

SEQ ID NO: 1986 - DNA, 23 bp, Homo sapiens
gtgctctccgcggccaggccggg

SEQ ID NO: 1987 - DNA, 23 bp, Homo sapiens
gtgctggcacacagggccccagg

SEQ ID NO: 1988 - DNA, 23 bp, Homo sapiens
gtgctgggtgatctgagccgcgg

SEQ ID NO: 1989 - DNA, 23 bp, Homo sapiens
gtggaagcctgggggcgaggagg

SEQ ID NO: 1990 - DNA, 23 bp, Homo sapiens
gtggacctggggaccctgcacgg

SEQ ID NO: 1991 - DNA, 23 bp, Homo sapiens
gtggactgggaagacggctccgg

SEQ ID NO: 1992 - DNA, 23 bp, Homo sapiens
gtggagaccaggcctgccagggg

SEQ ID NO: 1993 - DNA, 23 bp, Homo sapiens
gtggagcaggaggggccggacgg

SEQ ID NO: 1994 - DNA, 23 bp, Homo sapiens
gtggatggagcaggaggggccgg

SEQ ID NO: 1995 - DNA, 23 bp, Homo sapiens
gtggatgtgtggctgcaacctgg

SEQ ID NO: 1996 - DNA, 23 bp, Homo sapiens
gtggcgggtctgggggggggggg

SEQ ID NO: 1997 - DNA, 23 bp, Homo sapiens
gtgggaacctgggggcgaggagg

SEQ ID NO: 1998 - DNA, 23 bp, Homo sapiens
gtgggagactgggggcgaggagg

SEQ ID NO: 1999 - DNA, 23 bp, Homo sapiens
gtgggagactgggggtgaggagg

SEQ ID NO: 2000 - DNA, 23 bp, Homo sapiens
gtgggagcctgggagcgaggagg

SEQ ID NO: 2001 - DNA, 23 bp, Homo sapiens
gtgggaggcagcccgtgaggcgg

SEQ ID NO: 2002 - DNA, 23 bp, Homo sapiens
gtgggaggcggcccgggtggcgg

SEQ ID NO: 2003 - DNA, 23 bp, Homo sapiens
gtgggaggcggcccgtatggcgg

SEQ ID NO: 2004 - DNA, 23 bp, Homo sapiens
gtgggaggcggcccgtgtggagg

SEQ ID NO: 2005 - DNA, 23 bp, Homo sapiens
gtgggaggcggccggtgaggcgg

SEQ ID NO: 2006 - DNA, 23 bp, Homo sapiens
gtgggaggcggcctgtgaggcgg

SEQ ID NO: 2007 - DNA, 23 bp, Homo sapiens
gtgggaggcggctcgtgaggcgg

SEQ ID NO: 2008 - DNA, 23 bp, Homo sapiens
gtgggaggctgggggcgaggagg

SEQ ID NO: 2009 - DNA, 23 bp, Homo sapiens
gtgggcctgcggaacctgcgcgg

SEQ ID NO: 2010 - DNA, 23 bp, Homo sapiens
gtggggtggcgggtctggggggg

SEQ ID NO: 2011 - DNA, 23 bp, Homo sapiens
gtgggtcacgtgtgtctttgcgg

SEQ ID NO: 2012 - DNA, 23 bp, Homo sapiens
gtgggtggagaaggaggggccgg

SEQ ID NO: 2013 - DNA, 23 bp, Homo sapiens
gtggtcatatgtgtcttgggggg

SEQ ID NO: 2014 - DNA, 23 bp, Homo sapiens
gtggtggtcatatgtgtcttggg

SEQ ID NO: 2015 - DNA, 23 bp, Homo sapiens
gtggttagtcatatgcgttttgg

SEQ ID NO: 2016 - DNA, 23 bp, Homo sapiens
gtgtagatacctcatggagtggg

SEQ ID NO: 2017 - DNA, 23 bp, Homo sapiens
gtgtaggcataatgtgaggaggg

SEQ ID NO: 2018 - DNA, 23 bp, Homo sapiens
gtgtccgcggcggtccaggaggg

SEQ ID NO: 2019 - DNA, 23 bp, Homo sapiens
gtgtctctcatcacttgtaaagg

SEQ ID NO: 2020 - DNA, 23 bp, Homo sapiens
gtgtctttgcggggtctgatggg

SEQ ID NO: 2021 - DNA, 23 bp, Homo sapiens
gtgtgactgcagacccaggcggg

SEQ ID NO: 2022 - DNA, 23 bp, Homo sapiens
gtgttcccgtcccaatattccgg

SEQ ID NO: 2023 - DNA, 23 bp, Homo sapiens
gtgttccggtcccaatgctccgg

SEQ ID NO: 2024 - DNA, 23 bp, Homo sapiens
gtgttcgggtcccaatactccgg

SEQ ID NO: 2025 - DNA, 23 bp, Homo sapiens
gttagtcatatgcgttttggggg

SEQ ID NO: 2026 - DNA, 23 bp, Homo sapiens
gttccatcccctggcaggcctgg

SEQ ID NO: 2027 - DNA, 23 bp, Homo sapiens
gttctagaagtcccaggtcccgg

SEQ ID NO: 2028 - DNA, 23 bp, Homo sapiens
gttctggtagggaaggggtgagg

SEQ ID NO: 2029 - DNA, 23 bp, Homo sapiens
gttgaggtcaaaatccccgcggg

SEQ ID NO: 2030 - DNA, 23 bp, Homo sapiens
gttgcgacgtggggccggacggg

SEQ ID NO: 2031 - DNA, 23 bp, Homo sapiens
gttggacaggaggaattatgggg

SEQ ID NO: 2032 - DNA, 23 bp, Homo sapiens
gttggaggcggcccgtggggcgg

SEQ ID NO: 2033 - DNA, 23 bp, Homo sapiens
gttggggaatctccaaggctggg

SEQ ID NO: 2034 - DNA, 23 bp, Homo sapiens
gttggtgtaggcataatgtgagg

SEQ ID NO: 2035 - DNA, 23 bp, Homo sapiens
gttgtaatccttgccgtcgtagg

SEQ ID NO: 2036 - DNA, 23 bp, Homo sapiens
gtttaggccaaaaatccccctgg

SEQ ID NO: 2037 - DNA, 23 bp, Homo sapiens
gtttccagagagtgactctgagg

SEQ ID NO: 2038 - DNA, 23 bp, Homo sapiens
gtttctccacatccgtgtcctgg

SEQ ID NO: 2039 - DNA, 23 bp, Homo sapiens
taaagcacctgttacaatgaagg

SEQ ID NO: 2040 - DNA, 23 bp, Homo sapiens
taacccactgagatgaagcgggg

SEQ ID NO: 2041 - DNA, 23 bp, Homo sapiens
taaggagacgctgcagcgcacgg

SEQ ID NO: 2042 - DNA, 23 bp, Homo sapiens
taaggccctgactcctttctggg

SEQ ID NO: 2043 - DNA, 23 bp, Homo sapiens
taagtgggaggcggcccgtgagg

SEQ ID NO: 2044 - DNA, 23 bp, Homo sapiens
taatcttctattccctgacgagg

SEQ ID NO: 2045 - DNA, 23 bp, Homo sapiens
taatcttctattccctgcagagg

SEQ ID NO: 2046 - DNA, 23 bp, Homo sapiens
taatgaagcggggctccccgcgg

SEQ ID NO: 2047 - DNA, 23 bp, Homo sapiens
taatgtgtgactgcagacccagg

SEQ ID NO: 2048 - DNA, 23 bp, Homo sapiens
taattgtcctagacagcagaggg

SEQ ID NO: 2049 - DNA, 23 bp, Homo sapiens
tacacatccgtgtcccggcccgg

SEQ ID NO: 2050 - DNA, 23 bp, Homo sapiens
tacaccgccatgacccggcccgg

SEQ ID NO: 2051 - DNA, 23 bp, Homo sapiens
tacaccgccgtgtcccggccagg

SEQ ID NO: 2052 - DNA, 23 bp, Homo sapiens
tacaccgccgtgtcccggcctgg

SEQ ID NO: 2053 - DNA, 23 bp, Homo sapiens
tacaccgccgtgtccgggcccgg

SEQ ID NO: 2054 - DNA, 23 bp, Homo sapiens
tacaccgctatgtcccggcccgg

SEQ ID NO: 2055 - DNA, 23 bp, Homo sapiens
tacatctccgtgtcccggcccgg

SEQ ID NO: 2056 - DNA, 23 bp, Homo sapiens
taccaccactacgcctacgacgg

SEQ ID NO: 2057 - DNA, 23 bp, Homo sapiens
taccaccagttcgcctacgacgg

SEQ ID NO: 2058 - DNA, 23 bp, Homo sapiens
tacccagcgcaagttggaggcgg

SEQ ID NO: 2059 - DNA, 23 bp, Homo sapiens
taccggcagcacgcctacgacgg

SEQ ID NO: 2060 - DNA, 23 bp, Homo sapiens
taccggcaggacgcctaagacgg

SEQ ID NO: 2061 - DNA, 23 bp, Homo sapiens
taccggcaggacgcctacgaagg

SEQ ID NO: 2062 - DNA, 23 bp, Homo sapiens
taccggcaggtcgcctacgacgg

SEQ ID NO: 2063 - DNA, 23 bp, Homo sapiens
taccgttctccaggtatctgcgg

SEQ ID NO: 2064 - DNA, 23 bp, Homo sapiens
tacctcaaggagtgggagcctgg

SEQ ID NO: 2065 - DNA, 23 bp, Homo sapiens
tacctcatgaagtgggagcctgg

SEQ ID NO: 2066 - DNA, 23 bp, Homo sapiens
tacctcatggagagggagcctgg

SEQ ID NO: 2067 - DNA, 23 bp, Homo sapiens
tacctcatggagtaggagcctgg

SEQ ID NO: 2068 - DNA, 23 bp, Homo sapiens
tacctcatggagtggaagcctgg

SEQ ID NO: 2069 - DNA, 23 bp, Homo sapiens
tacctcatggagtgggaacctgg

SEQ ID NO: 2070 - DNA, 23 bp, Homo sapiens
tacctggagggcctgtgcgtggg

SEQ ID NO: 2071 - DNA, 23 bp, Homo sapiens
tacgtcatggagtgggagcctgg

SEQ ID NO: 2072 - DNA, 23 bp, Homo sapiens
tactacaaccagagcgagaccgg

SEQ ID NO: 2073 - DNA, 23 bp, Homo sapiens
tactacaaccggagcgaggacgg

SEQ ID NO: 2074 - DNA, 23 bp, Homo sapiens
tactacaaccggagcgaggccgg

SEQ ID NO: 2075 - DNA, 23 bp, Homo sapiens
tactacaacgagagcgaggccgg

SEQ ID NO: 2076 - DNA, 23 bp, Homo sapiens
tactataaccagagcgaggacgg

SEQ ID NO: 2077 - DNA, 23 bp, Homo sapiens
tactgcaaccagagcgaggccgg

SEQ ID NO: 2078 - DNA, 23 bp, Homo sapiens
tacttcatggagtgggaggctgg

SEQ ID NO: 2079 - DNA, 23 bp, Homo sapiens
tacttctggaaattctttttggg

SEQ ID NO: 2080 - DNA, 23 bp, Homo sapiens
tagaagtcccaggtcccgggcgg

SEQ ID NO: 2081 - DNA, 23 bp, Homo sapiens
tagacgacacgcagttcgtgcgg

SEQ ID NO: 2082 - DNA, 23 bp, Homo sapiens
tagagtgggcaggggggtggtgg

SEQ ID NO: 2083 - DNA, 23 bp, Homo sapiens
tagagtgggcggggggggggtgg

SEQ ID NO: 2084 - DNA, 23 bp, Homo sapiens
tagcccacagcgatgaagcgggg

SEQ ID NO: 2085 - DNA, 23 bp, Homo sapiens
tagcccacggcgatgaagcaggg

SEQ ID NO: 2086 - DNA, 23 bp, Homo sapiens
tagcccacggtaatgaagcgggg

SEQ ID NO: 2087 - DNA, 23 bp, Homo sapiens
tagcccactgagacgaagcgggg

SEQ ID NO: 2088 - DNA, 23 bp, Homo sapiens
tagcgcactgagatgaagcgggg

SEQ ID NO: 2089 - DNA, 23 bp, Homo sapiens
taggaggaagagttctggtaggg

SEQ ID NO: 2090 - DNA, 23 bp, Homo sapiens
taggcataatgtgaggagatagg

SEQ ID NO: 2091 - DNA, 23 bp, Homo sapiens
taggcataatgtgaggagggtgg

SEQ ID NO: 2092 - DNA, 23 bp, Homo sapiens
tagggaaggggtggggagtgggg

SEQ ID NO: 2093 - DNA, 23 bp, Homo sapiens
taggtccgagatccgccccgagg

SEQ ID NO: 2094 - DNA, 23 bp, Homo sapiens
taggttctcacaccgtccagagg

SEQ ID NO: 2095 - DNA, 23 bp, Homo sapiens
tagtacaaccagagcgaggccgg

SEQ ID NO: 2096 - DNA, 23 bp, Homo sapiens
tataaccagtacgcctacgacgg

SEQ ID NO: 2097 - DNA, 23 bp, Homo sapiens
tataaccagttcgcctacgatgg

SEQ ID NO: 2098 - DNA, 23 bp, Homo sapiens
tatcccaggtgcctgcgtccggg

SEQ ID NO: 2099 - DNA, 23 bp, Homo sapiens
tatcccaggtgtctgtgtccagg

SEQ ID NO: 2100 - DNA, 23 bp, Homo sapiens
tatctctgctgttctccagaagg

SEQ ID NO: 2101 - DNA, 23 bp, Homo sapiens
tatctgcggagccactccacagg

SEQ ID NO: 2102 - DNA, 23 bp, Homo sapiens
tatgaccagtccgcctaagacgg

SEQ ID NO: 2103 - DNA, 23 bp, Homo sapiens
tatgaccggtccgcctacgacgg

SEQ ID NO: 2104 - DNA, 23 bp, Homo sapiens
tatgagcagtatgcctacgacgg

SEQ ID NO: 2105 - DNA, 23 bp, Homo sapiens
tatgatcagtccgcctacgacgg

SEQ ID NO: 2106 - DNA, 23 bp, Homo sapiens
tatggccagtccgcctacgacgg

SEQ ID NO: 2107 - DNA, 23 bp, Homo sapiens
tatggctgcgacgtggggcccgg

SEQ ID NO: 2108 - DNA, 23 bp, Homo sapiens
tatgtaatccttgccgtcgtagg

SEQ ID NO: 2109 - DNA, 23 bp, Homo sapiens
tatgtccagtacgcctacgacgg

SEQ ID NO: 2110 - DNA, 23 bp, Homo sapiens
tatgtcccggcccggccgcgggg

SEQ ID NO: 2111 - DNA, 23 bp, Homo sapiens
tatttctacaccgccgtgtccgg

SEQ ID NO: 2112 - DNA, 23 bp, Homo sapiens
tcaagagcccgcaggagacgtgg

SEQ ID NO: 2113 - DNA, 23 bp, Homo sapiens
tcaccgctaagatgtgtaggagg

SEQ ID NO: 2114 - DNA, 23 bp, Homo sapiens
tcaccttgatattatggtgttgg

SEQ ID NO: 2115 - DNA, 23 bp, Homo sapiens
tcacgacccctcattccccacgg

SEQ ID NO: 2116 - DNA, 23 bp, Homo sapiens
tcactctctggaaacccaggagg

SEQ ID NO: 2117 - DNA, 23 bp, Homo sapiens
tcacttcttctcccaacttgtgg

SEQ ID NO: 2118 - DNA, 23 bp, Homo sapiens
tcagagcccgcaggagacgttgg

SEQ ID NO: 2119 - DNA, 23 bp, Homo sapiens
tcagatcaccaagcacaagtggg

SEQ ID NO: 2120 - DNA, 23 bp, Homo sapiens
tcagatcacccagcacaagttgg

SEQ ID NO: 2121 - DNA, 23 bp, Homo sapiens
tcagatcacccagcccaagtggg

SEQ ID NO: 2122 - DNA, 23 bp, Homo sapiens
tcagatcacccagcccaagttgg

SEQ ID NO: 2123 - DNA, 23 bp, Homo sapiens
tcagatcacccagcgcaaatggg

SEQ ID NO: 2124 - DNA, 23 bp, Homo sapiens
tcagatcacccagcgtaagtggg

SEQ ID NO: 2125 - DNA, 23 bp, Homo sapiens
tcagatcaccgagcgcaagtggg

SEQ ID NO: 2126 - DNA, 23 bp, Homo sapiens
tcagatcactcagcgcaagttgg

SEQ ID NO: 2127 - DNA, 23 bp, Homo sapiens
tcagatcatccagcgcaagtggg

SEQ ID NO: 2128 - DNA, 23 bp, Homo sapiens
tcagattacccagcgcaagttgg

SEQ ID NO: 2129 - DNA, 23 bp, Homo sapiens
tcaggcagtgacagtgcccaggg

SEQ ID NO: 2130 - DNA, 23 bp, Homo sapiens
tcagggactagaattctccacgg

SEQ ID NO: 2131 - DNA, 23 bp, Homo sapiens
tcagggtggcttcatggtcaggg

SEQ ID NO: 2132 - DNA, 23 bp, Homo sapiens
tcagtccgcctacgacggcaagg

SEQ ID NO: 2133 - DNA, 23 bp, Homo sapiens
tcatcccattttccattcaaggg

SEQ ID NO: 2134 - DNA, 23 bp, Homo sapiens
tcatgactattgtgttctgtagg

SEQ ID NO: 2135 - DNA, 23 bp, Homo sapiens
tcatgtttcctgatcccgcctgg

SEQ ID NO: 2136 - DNA, 23 bp, Homo sapiens
tcattccccacggacgggccggg

SEQ ID NO: 2137 - DNA, 23 bp, Homo sapiens
tcattcggtcagtctgtgcctgg

SEQ ID NO: 2138 - DNA, 23 bp, Homo sapiens
tcattttcctcccctcctcgtgg

SEQ ID NO: 2139 - DNA, 23 bp, Homo sapiens
tccactcaggtcaggaccagagg

SEQ ID NO: 2140 - DNA, 23 bp, Homo sapiens
tcccaggctcccactccatgagg

SEQ ID NO: 2141 - DNA, 23 bp, Homo sapiens
tcccaggtgcctgcgtccgctgg

SEQ ID NO: 2142 - DNA, 23 bp, Homo sapiens
tcccattctccaggtatctgcgg

SEQ ID NO: 2143 - DNA, 23 bp, Homo sapiens
tcccattcttcaggtgtctgcgg

SEQ ID NO: 2144 - DNA, 23 bp, Homo sapiens
tcccattttccattcaagggagg

SEQ ID NO: 2145 - DNA, 23 bp, Homo sapiens
tccccctggttggtcggggccgg

SEQ ID NO: 2146 - DNA, 23 bp, Homo sapiens
tcccgttccccaggtatctgcgg

SEQ ID NO: 2147 - DNA, 23 bp, Homo sapiens
tcccgttctccagatatctgcgg

SEQ ID NO: 2148 - DNA, 23 bp, Homo sapiens
tccctccttaacccatctcaggg

SEQ ID NO: 2149 - DNA, 23 bp, Homo sapiens
tccctccttatcccatctcaggg

SEQ ID NO: 2150 - DNA, 23 bp, Homo sapiens
tccctttctccaggtatctgcgg

SEQ ID NO: 2151 - DNA, 23 bp, Homo sapiens
tccctttcttcaggtatctgcgg

SEQ ID NO: 2152 - DNA, 23 bp, Homo sapiens
tccgcagacacctgaagaatggg

SEQ ID NO: 2153 - DNA, 23 bp, Homo sapiens
tccgcagacacctggagaacagg

SEQ ID NO: 2154 - DNA, 23 bp, Homo sapiens
tccgcagatacctgaagaaaggg

SEQ ID NO: 2155 - DNA, 23 bp, Homo sapiens
tccgcagatacctggagaaaggg

SEQ ID NO: 2156 - DNA, 23 bp, Homo sapiens
tccgcagatacctggagaaccgg

SEQ ID NO: 2157 - DNA, 23 bp, Homo sapiens
tccgcagatacctggagaatggg

SEQ ID NO: 2158 - DNA, 23 bp, Homo sapiens
tccgcagatacctggggaacggg

SEQ ID NO: 2159 - DNA, 23 bp, Homo sapiens
tccgcagatatctggagaacggg

SEQ ID NO: 2160 - DNA, 23 bp, Homo sapiens
tccgccgcgtccaggagcgcagg

SEQ ID NO: 2161 - DNA, 23 bp, Homo sapiens
tccgcggccgggccaggacacgg

SEQ ID NO: 2162 - DNA, 23 bp, Homo sapiens
tccgcggccgggcccggacacgg

SEQ ID NO: 2163 - DNA, 23 bp, Homo sapiens
tccgcggcctggccgggacacgg

SEQ ID NO: 2164 - DNA, 23 bp, Homo sapiens
tccggcccctcctccacccacgg

SEQ ID NO: 2165 - DNA, 23 bp, Homo sapiens
tccggttctccaggtatctgcgg

SEQ ID NO: 2166 - DNA, 23 bp, Homo sapiens
tccgtgtcccggcccggcagcgg

SEQ ID NO: 2167 - DNA, 23 bp, Homo sapiens
tcctaccggcgcggctccccggg

SEQ ID NO: 2168 - DNA, 23 bp, Homo sapiens
tcctccacccacggcgcccgcgg

SEQ ID NO: 2169 - DNA, 23 bp, Homo sapiens
tcctcccctttgtgacttcaagg

SEQ ID NO: 2170 - DNA, 23 bp, Homo sapiens
tcctccctgcgccgctccccggg

SEQ ID NO: 2171 - DNA, 23 bp, Homo sapiens
tcctccctgcgcggcttcccggg

SEQ ID NO: 2172 - DNA, 23 bp, Homo sapiens
tcctgaagatctgtgtgttccgg

SEQ ID NO: 2173 - DNA, 23 bp, Homo sapiens
tcctgacctgcgccaccggccgg

SEQ ID NO: 2174 - DNA, 23 bp, Homo sapiens
tcctgtccaacgtctcctgcggg

SEQ ID NO: 2175 - DNA, 23 bp, Homo sapiens
tcctgttctccaggtgtctgcgg

SEQ ID NO: 2176 - DNA, 23 bp, Homo sapiens
tcgacgggcgcctcctccgcggg

SEQ ID NO: 2177 - DNA, 23 bp, Homo sapiens
tcgccctccctctggtcttgagg

SEQ ID NO: 2178 - DNA, 23 bp, Homo sapiens
tcgcctggtctccacaagctcgg

SEQ ID NO: 2179 - DNA, 23 bp, Homo sapiens
tcgcttgtaaggtgagattctgg

SEQ ID NO: 2180 - DNA, 23 bp, Homo sapiens
tcggacgggcgcctcctccgcgg

SEQ ID NO: 2181 - DNA, 23 bp, Homo sapiens
tcgggccactcctcgcccccagg

SEQ ID NO: 2182 - DNA, 23 bp, Homo sapiens
tcgggcccctcctcgcccccagg

SEQ ID NO: 2183 - DNA, 23 bp, Homo sapiens
tcggggctggggcggggttcggg

SEQ ID NO: 2184 - DNA, 23 bp, Homo sapiens
tcgggggaaggtccctgctaagg

SEQ ID NO: 2185 - DNA, 23 bp, Homo sapiens
tcgggggacggggctggccgcgg

SEQ ID NO: 2186 - DNA, 23 bp, Homo sapiens
tcgggggactgggctgaccacgg

SEQ ID NO: 2187 - DNA, 23 bp, Homo sapiens
tcgggggctgggctgaccgcggg

SEQ ID NO: 2188 - DNA, 23 bp, Homo sapiens
tcggtaaggagggggatgagggg

SEQ ID NO: 2189 - DNA, 23 bp, Homo sapiens
tcgtggagaccaggcctgccagg

SEQ ID NO: 2190 - DNA, 23 bp, Homo sapiens
tcgtggaggccaggcctgcaggg

SEQ ID NO: 2191 - DNA, 23 bp, Homo sapiens
tcgtgtcccggcccggccgcggg

SEQ ID NO: 2192 - DNA, 23 bp, Homo sapiens
tctaccctgcggagatcacacgg

SEQ ID NO: 2193 - DNA, 23 bp, Homo sapiens
tctcaactgctccgcctcacggg

SEQ ID NO: 2194 - DNA, 23 bp, Homo sapiens
tctcaactgctcctccacacggg

SEQ ID NO: 2195 - DNA, 23 bp, Homo sapiens
tctcaactgctctgccacacggg

SEQ ID NO: 2196 - DNA, 23 bp, Homo sapiens
tctcacatccagaggatgtacgg

SEQ ID NO: 2197 - DNA, 23 bp, Homo sapiens
tctcactccaattgggtgtcggg

SEQ ID NO: 2198 - DNA, 23 bp, Homo sapiens
tctcactcccatcgggtgtcggg

SEQ ID NO: 2199 - DNA, 23 bp, Homo sapiens
tctcactcctattgggtgtcggg

SEQ ID NO: 2200 - DNA, 23 bp, Homo sapiens
tctcagccactgctcgccccagg

SEQ ID NO: 2201 - DNA, 23 bp, Homo sapiens
tctcagctgctccgccacatggg

SEQ ID NO: 2202 - DNA, 23 bp, Homo sapiens
tctcagctgctccgccacccggg

SEQ ID NO: 2203 - DNA, 23 bp, Homo sapiens
tctcagctgctccgccccacggg

SEQ ID NO: 2204 - DNA, 23 bp, Homo sapiens
tctcagctgctcggccgcacggg

SEQ ID NO: 2205 - DNA, 23 bp, Homo sapiens
tctccacagggtagaaacccagg

SEQ ID NO: 2206 - DNA, 23 bp, Homo sapiens
tctccacagggtagaagcccagg

SEQ ID NO: 2207 - DNA, 23 bp, Homo sapiens
tctccacagggtagaagctcagg

SEQ ID NO: 2208 - DNA, 23 bp, Homo sapiens
tctcccccagacgccgaggatgg

SEQ ID NO: 2209 - DNA, 23 bp, Homo sapiens
tctccctcaagaccagagggagg

SEQ ID NO: 2210 - DNA, 23 bp, Homo sapiens
tctccgcagggtagaagcacagg

SEQ ID NO: 2211 - DNA, 23 bp, Homo sapiens
tctccgctgctcccgccgcatgg

SEQ ID NO: 2212 - DNA, 23 bp, Homo sapiens
tctccgctgctccgcccgacggg

SEQ ID NO: 2213 - DNA, 23 bp, Homo sapiens
tctccgctgctccgcctcacagg

SEQ ID NO: 2214 - DNA, 23 bp, Homo sapiens
tctccgctgctccgcctcaccgg

SEQ ID NO: 2215 - DNA, 23 bp, Homo sapiens
tctccgttgctccgcctcacggg

SEQ ID NO: 2216 - DNA, 23 bp, Homo sapiens
tctcctgcgggctcttgaccagg

SEQ ID NO: 2217 - DNA, 23 bp, Homo sapiens
tctcggagccccgcggcttcggg

SEQ ID NO: 2218 - DNA, 23 bp, Homo sapiens
tctcgttgtagtagccgcgcagg

SEQ ID NO: 2219 - DNA, 23 bp, Homo sapiens
tctctaggacaattaagggatgg

SEQ ID NO: 2220 - DNA, 23 bp, Homo sapiens
tctctccgtcagtctgtgcctgg

SEQ ID NO: 2221 - DNA, 23 bp, Homo sapiens
tctctcggtcagtctgtgatggg

SEQ ID NO: 2222 - DNA, 23 bp, Homo sapiens
tctctgctgctccgccacacggg

SEQ ID NO: 2223 - DNA, 23 bp, Homo sapiens
tctctgctgctccgcctcatggg

SEQ ID NO: 2224 - DNA, 23 bp, Homo sapiens
tctgagccgccgtgtccgccagg

SEQ ID NO: 2225 - DNA, 23 bp, Homo sapiens
tctgcactgctccgcctcacggg

SEQ ID NO: 2226 - DNA, 23 bp, Homo sapiens
tctgccccacactcagtgtttgg

SEQ ID NO: 2227 - DNA, 23 bp, Homo sapiens
tctgcggtcgaggttctgggcgg

SEQ ID NO: 2228 - DNA, 23 bp, Homo sapiens
tctgcgttcctggaccgccgcgg

SEQ ID NO: 2229 - DNA, 23 bp, Homo sapiens
tctgctcctgatctgagtagagg

SEQ ID NO: 2230 - DNA, 23 bp, Homo sapiens
tctgctgtctaggacaattaagg

SEQ ID NO: 2231 - DNA, 23 bp, Homo sapiens
tctggaaacccgacacccgatgg

SEQ ID NO: 2232 - DNA, 23 bp, Homo sapiens
tctgggaaaaggggaaggtgagg

SEQ ID NO: 2233 - DNA, 23 bp, Homo sapiens
tctggggggggggggggcagagg

SEQ ID NO: 2234 - DNA, 23 bp, Homo sapiens
tctgggttttgttgtcccactgg

SEQ ID NO: 2235 - DNA, 23 bp, Homo sapiens
tctggtagggaaggggtgagggg

SEQ ID NO: 2236 - DNA, 23 bp, Homo sapiens
tctggttatagtagccgcgcagg

SEQ ID NO: 2237 - DNA, 23 bp, Homo sapiens
tctggttgcagtagccgcgcagg

SEQ ID NO: 2238 - DNA, 23 bp, Homo sapiens
tctggttgtactagccgcgcagg

SEQ ID NO: 2239 - DNA, 23 bp, Homo sapiens
tctggttgtagtacccgcgcagg

SEQ ID NO: 2240 - DNA, 23 bp, Homo sapiens
tctggttgtagtagccaagcagg

SEQ ID NO: 2241 - DNA, 23 bp, Homo sapiens
tctggttgtagtagccgtgcagg

SEQ ID NO: 2242 - DNA, 23 bp, Homo sapiens
tctggttgtagtggccgcgcagg

SEQ ID NO: 2243 - DNA, 23 bp, Homo sapiens
tctgtcctgctccgccatacggg

SEQ ID NO: 2244 - DNA, 23 bp, Homo sapiens
tctgtgtccaggctggtgtctgg

SEQ ID NO: 2245 - DNA, 23 bp, Homo sapiens
tctgttcctgatctgagtggagg

SEQ ID NO: 2246 - DNA, 23 bp, Homo sapiens
tcttagctgctccgccacacggg

SEQ ID NO: 2247 - DNA, 23 bp, Homo sapiens
tcttctccctcaagaccagaggg

SEQ ID NO: 2248 - DNA, 23 bp, Homo sapiens
tcttgaagatctgtgtctcccgg

SEQ ID NO: 2249 - DNA, 23 bp, Homo sapiens
tcttgaagatctgtgtgttcggg

SEQ ID NO: 2250 - DNA, 23 bp, Homo sapiens
tcttgcagatctgtgtctcccgg

SEQ ID NO: 2251 - DNA, 23 bp, Homo sapiens
tcttggagatctctgtctcccgg

SEQ ID NO: 2252 - DNA, 23 bp, Homo sapiens
tcttggggtctagagtgggcagg

SEQ ID NO: 2253 - DNA, 23 bp, Homo sapiens
tgaaaatgaaaccgggttaaagg

SEQ ID NO: 2254 - DNA, 23 bp, Homo sapiens
tgaaaccgggtaaaggcacctgg

SEQ ID NO: 2255 - DNA, 23 bp, Homo sapiens
tgaaaccgggtaaagtcgcctgg

SEQ ID NO: 2256 - DNA, 23 bp, Homo sapiens
tgaaagacgacctgcgctcttgg

SEQ ID NO: 2257 - DNA, 23 bp, Homo sapiens
tgaacgaggacctaagctcctgg

SEQ ID NO: 2258 - DNA, 23 bp, Homo sapiens
tgaacgaggacctgagctcccgg

SEQ ID NO: 2259 - DNA, 23 bp, Homo sapiens
tgaacgaggacctgccctcctgg

SEQ ID NO: 2260 - DNA, 23 bp, Homo sapiens
tgaacgaggatctgcgttcctgg

SEQ ID NO: 2261 - DNA, 23 bp, Homo sapiens
tgacatctctgaggaaatggagg

SEQ ID NO: 2262 - DNA, 23 bp, Homo sapiens
tgaccgcgagggctgggccaggg

SEQ ID NO: 2263 - DNA, 23 bp, Homo sapiens
tgaccgcggggcctaggccaggg

SEQ ID NO: 2264 - DNA, 23 bp, Homo sapiens
tgaccgcggggtccgggccaggg

SEQ ID NO: 2265 - DNA, 23 bp, Homo sapiens
tgacctgagtggaggctgagggg

SEQ ID NO: 2266 - DNA, 23 bp, Homo sapiens
tgacggccattctcggcgtctgg

SEQ ID NO: 2267 - DNA, 23 bp, Homo sapiens
tgactcatgatgctggaatcagg

SEQ ID NO: 2268 - DNA, 23 bp, Homo sapiens
tgactggggactttagaacctgg

SEQ ID NO: 2269 - DNA, 23 bp, Homo sapiens
tgactggtgactttagaaccggg

SEQ ID NO: 2270 - DNA, 23 bp, Homo sapiens
tgactttagaaccgggactgcgg

SEQ ID NO: 2271 - DNA, 23 bp, Homo sapiens
tgagagcctacctggagggccgg

SEQ ID NO: 2272 - DNA, 23 bp, Homo sapiens
tgagatcccagaaaggagtcagg

SEQ ID NO: 2273 - DNA, 23 bp, Homo sapiens
tgagctcctggcggacacggcgg

SEQ ID NO: 2274 - DNA, 23 bp, Homo sapiens
tgagcttgtggagaccagaccgg

SEQ ID NO: 2275 - DNA, 23 bp, Homo sapiens
tgaggcctgcgccccgggccggg

SEQ ID NO: 2276 - DNA, 23 bp, Homo sapiens
tgagggagaagaatcctcctggg

SEQ ID NO: 2277 - DNA, 23 bp, Homo sapiens
tgaggggcttcggtaaggagggg

SEQ ID NO: 2278 - DNA, 23 bp, Homo sapiens
tgagtatgaggcagagaacaagg

SEQ ID NO: 2279 - DNA, 23 bp, Homo sapiens
tgagtctctcatcgcttgtaagg

SEQ ID NO: 2280 - DNA, 23 bp, Homo sapiens
tgagtgtgaagcagagaacaggg

SEQ ID NO: 2281 - DNA, 23 bp, Homo sapiens
tgagtgtgaagcagagaacgagg

SEQ ID NO: 2282 - DNA, 23 bp, Homo sapiens
tgagtgtggggcagagaacaagg

SEQ ID NO: 2283 - DNA, 23 bp, Homo sapiens
tgatcgcctgtagatctccgggg

SEQ ID NO: 2284 - DNA, 23 bp, Homo sapiens
tgatgccggtgggcgtgtggagg

SEQ ID NO: 2285 - DNA, 23 bp, Homo sapiens
tgatggccatcctcggcgtctgg

SEQ ID NO: 2286 - DNA, 23 bp, Homo sapiens
tgatggcggtggccgtgtggagg

SEQ ID NO: 2287 - DNA, 23 bp, Homo sapiens
tgatgggggtgggagtgtgaagg

SEQ ID NO: 2288 - DNA, 23 bp, Homo sapiens
tgattccagcatcatgagtcagg

SEQ ID NO: 2289 - DNA, 23 bp, Homo sapiens
tgattccagcattcatgagtcgg

SEQ ID NO: 2290 - DNA, 23 bp, Homo sapiens
tgcagccacacatccactggagg

SEQ ID NO: 2291 - DNA, 23 bp, Homo sapiens
tgcatgtaagtgatggcggtggg

SEQ ID NO: 2292 - DNA, 23 bp, Homo sapiens
tgccccacactcagtgtttgggg

SEQ ID NO: 2293 - DNA, 23 bp, Homo sapiens
tgcccggccccgaccaaccaggg

SEQ ID NO: 2294 - DNA, 23 bp, Homo sapiens
tgccgtcgtaggcgaactggtgg

SEQ ID NO: 2295 - DNA, 23 bp, Homo sapiens
tgccgtcgtaggcgacctgccgg

SEQ ID NO: 2296 - DNA, 23 bp, Homo sapiens
tgccgtcgtaggcgtagtggtgg

SEQ ID NO: 2297 - DNA, 23 bp, Homo sapiens
tgccgtcgtaggcgtgctgccgg

SEQ ID NO: 2298 - DNA, 23 bp, Homo sapiens
tgccgtcttaggcgtcctgccgg

SEQ ID NO: 2299 - DNA, 23 bp, Homo sapiens
tgcctgcgtccgctggtgtctgg

SEQ ID NO: 2300 - DNA, 23 bp, Homo sapiens
tgccttcgtaggcgtcctgccgg

SEQ ID NO: 2301 - DNA, 23 bp, Homo sapiens
tgcggagccactccacacacagg

SEQ ID NO: 2302 - DNA, 23 bp, Homo sapiens
tgcggagccactcctcgcacagg

SEQ ID NO: 2303 - DNA, 23 bp, Homo sapiens
tgcggagcgaccccacgcacagg

SEQ ID NO: 2304 - DNA, 23 bp, Homo sapiens
tgcgtccagcgacagtgcccagg

SEQ ID NO: 2305 - DNA, 23 bp, Homo sapiens
tgcgtgtaaatgatggcggcggg

SEQ ID NO: 2306 - DNA, 23 bp, Homo sapiens
tgcgtgtaagtgatgccggtggg

SEQ ID NO: 2307 - DNA, 23 bp, Homo sapiens
tgctccacccacggcgcctgcgg

SEQ ID NO: 2308 - DNA, 23 bp, Homo sapiens
tgctccatccacggctcccgcgg

SEQ ID NO: 2309 - DNA, 23 bp, Homo sapiens
tgctctatccaccgcgcccgcgg

SEQ ID NO: 2310 - DNA, 23 bp, Homo sapiens
tgctctatccagggcgcccgcgg

SEQ ID NO: 2311 - DNA, 23 bp, Homo sapiens
tgctctatccatggctcccgggg

SEQ ID NO: 2312 - DNA, 23 bp, Homo sapiens
tgctgcagcgcacgggtaccagg

SEQ ID NO: 2313 - DNA, 23 bp, Homo sapiens
tgctggcctggctgtccttgtgg

SEQ ID NO: 2314 - DNA, 23 bp, Homo sapiens
tggaaccttccagaagtgggagg

SEQ ID NO: 2315 - DNA, 23 bp, Homo sapiens
tggaagcctgggggcgaggaggg

SEQ ID NO: 2316 - DNA, 23 bp, Homo sapiens
tggaaggttctatctcctgcagg

SEQ ID NO: 2317 - DNA, 23 bp, Homo sapiens
tggaaggttctatctcctgccgg

SEQ ID NO: 2318 - DNA, 23 bp, Homo sapiens
tggacctggggaccctgcgcggg

SEQ ID NO: 2319 - DNA, 23 bp, Homo sapiens
tggacgacaagcagttcgtgagg

SEQ ID NO: 2320 - DNA, 23 bp, Homo sapiens
tggacgacacgcacttcgtgcgg

SEQ ID NO: 2321 - DNA, 23 bp, Homo sapiens
tggacgacacgcagttagtgcgg

SEQ ID NO: 2322 - DNA, 23 bp, Homo sapiens
tggacgacacgcagttcatgagg

SEQ ID NO: 2323 - DNA, 23 bp, Homo sapiens
tggacgacacgcagtttgtgcgg

SEQ ID NO: 2324 - DNA, 23 bp, Homo sapiens
tggacgacacgctgttcatgagg

SEQ ID NO: 2325 - DNA, 23 bp, Homo sapiens
tggacgacacgctgttggtgagg

SEQ ID NO: 2326 - DNA, 23 bp, Homo sapiens
tggacgaggacctgcgctcctgg

SEQ ID NO: 2327 - DNA, 23 bp, Homo sapiens
tggacgatacgcagttcgtgcgg

SEQ ID NO: 2328 - DNA, 23 bp, Homo sapiens
tggactgcggagacgctgattgg

SEQ ID NO: 2329 - DNA, 23 bp, Homo sapiens
tggactgggaagacggctccggg

SEQ ID NO: 2330 - DNA, 23 bp, Homo sapiens
tggagaaacacctcatggagtgg

SEQ ID NO: 2331 - DNA, 23 bp, Homo sapiens
tggagaaatacgtcatggagtgg

SEQ ID NO: 2332 - DNA, 23 bp, Homo sapiens
tggagcccctcaccctgagatgg

SEQ ID NO: 2333 - DNA, 23 bp, Homo sapiens
tggagcccttcagcagggtcggg

SEQ ID NO: 2334 - DNA, 23 bp, Homo sapiens
tggagccgcgagccagaggatgg

SEQ ID NO: 2335 - DNA, 23 bp, Homo sapiens
tggaggacacgtgcgtggagtgg

SEQ ID NO: 2336 - DNA, 23 bp, Homo sapiens
tggaggaggggccggagtattgg

SEQ ID NO: 2337 - DNA, 23 bp, Homo sapiens
tggagggaacgtgcgtggagtgg

SEQ ID NO: 2338 - DNA, 23 bp, Homo sapiens
tggagggcaagtgcgtggagtgg

SEQ ID NO: 2339 - DNA, 23 bp, Homo sapiens
tggagggcacgcgcgtggagtgg

SEQ ID NO: 2340 - DNA, 23 bp, Homo sapiens
tggagggcacgtacgtggagtgg

SEQ ID NO: 2341 - DNA, 23 bp, Homo sapiens
tggagggcacgtgagtggagtgg

SEQ ID NO: 2342 - DNA, 23 bp, Homo sapiens
tggagggcacgtgcatggagtgg

SEQ ID NO: 2343 - DNA, 23 bp, Homo sapiens
tggagggcacgtgcgtggtgtgg

SEQ ID NO: 2344 - DNA, 23 bp, Homo sapiens
tggagggcacgtgtgtggagtgg

SEQ ID NO: 2345 - DNA, 23 bp, Homo sapiens
tggagggcacgttcgtggagtgg

SEQ ID NO: 2346 - DNA, 23 bp, Homo sapiens
tggagggcctgtgcgaggagtgg

SEQ ID NO: 2347 - DNA, 23 bp, Homo sapiens
tggagggcctgtgtgtggagtgg

SEQ ID NO: 2348 - DNA, 23 bp, Homo sapiens
tggagggcgagttcgtggagtgg

SEQ ID NO: 2349 - DNA, 23 bp, Homo sapiens
tggatgtgagaccctggccccgg

SEQ ID NO: 2350 - DNA, 23 bp, Homo sapiens
tggatgtgtggctgcaacctggg

SEQ ID NO: 2351 - DNA, 23 bp, Homo sapiens
tggatgtttggctgcgaccttgg

SEQ ID NO: 2352 - DNA, 23 bp, Homo sapiens
tggccgcggggccggggccaggg

SEQ ID NO: 2353 - DNA, 23 bp, Homo sapiens
tggcctcccacgaggaagggagg

SEQ ID NO: 2354 - DNA, 23 bp, Homo sapiens
tggcctggtctccacaagctggg

SEQ ID NO: 2355 - DNA, 23 bp, Homo sapiens
tggcgggtctggggggggggggg

SEQ ID NO: 2356 - DNA, 23 bp, Homo sapiens
tggcgtctctgaggaaatggagg

SEQ ID NO: 2357 - DNA, 23 bp, Homo sapiens
tggctactacaaccagagcgagg

SEQ ID NO: 2358 - DNA, 23 bp, Homo sapiens
tggctcccatctcagggtgaggg

SEQ ID NO: 2359 - DNA, 23 bp, Homo sapiens
tggctcgcggctccatcctctgg

SEQ ID NO: 2360 - DNA, 23 bp, Homo sapiens
tgggaaaaggggaaggtgagggg

SEQ ID NO: 2361 - DNA, 23 bp, Homo sapiens
tgggaacctgggggcgaggaggg

SEQ ID NO: 2362 - DNA, 23 bp, Homo sapiens
tgggaagacggctccgggaaagg

SEQ ID NO: 2363 - DNA, 23 bp, Homo sapiens
tgggaagcaaatgtcctgtgagg

SEQ ID NO: 2364 - DNA, 23 bp, Homo sapiens
tgggagactgggggcgaggaggg

SEQ ID NO: 2365 - DNA, 23 bp, Homo sapiens
tgggagactgggggtgaggaggg

SEQ ID NO: 2366 - DNA, 23 bp, Homo sapiens
tgggagcctgggagcgaggaggg

SEQ ID NO: 2367 - DNA, 23 bp, Homo sapiens
tgggagcctggggcgagcagtgg

SEQ ID NO: 2368 - DNA, 23 bp, Homo sapiens
tgggaggcggtccatgcggcggg

SEQ ID NO: 2369 - DNA, 23 bp, Homo sapiens
tgggaggctgggggcgaggaggg

SEQ ID NO: 2370 - DNA, 23 bp, Homo sapiens
tgggagggaagcggcctctatgg

SEQ ID NO: 2371 - DNA, 23 bp, Homo sapiens
tgggataaggagggagatggggg

SEQ ID NO: 2372 - DNA, 23 bp, Homo sapiens
tgggcggggctcgggggagctgg

SEQ ID NO: 2373 - DNA, 23 bp, Homo sapiens
tgggcggggggggggtggggtgg

SEQ ID NO: 2374 - DNA, 23 bp, Homo sapiens
tggggcggggttcgggggacggg

SEQ ID NO: 2375 - DNA, 23 bp, Homo sapiens
tggggggggggggggcagagggg

SEQ ID NO: 2376 - DNA, 23 bp, Homo sapiens
tggggtctagagtgggcaggggg

SEQ ID NO: 2377 - DNA, 23 bp, Homo sapiens
tggggtggcgggtctgggggggg

SEQ ID NO: 2378 - DNA, 23 bp, Homo sapiens
tgggtcacgtgtgtctttgcggg

SEQ ID NO: 2379 - DNA, 23 bp, Homo sapiens
tgggttaaggagggagatggggg

SEQ ID NO: 2380 - DNA, 23 bp, Homo sapiens
tgggttttgttgtcccactgggg

SEQ ID NO: 2381 - DNA, 23 bp, Homo sapiens
tggtcaccgctaagatgtgtagg

SEQ ID NO: 2382 - DNA, 23 bp, Homo sapiens
tggtcatacccgcggaggagggg

SEQ ID NO: 2383 - DNA, 23 bp, Homo sapiens
tggtcatatgtgtcttggggggg

SEQ ID NO: 2384 - DNA, 23 bp, Homo sapiens
tggtgggcacgtgcgtggagtgg

SEQ ID NO: 2385 - DNA, 23 bp, Homo sapiens
tggtgggggtgggagtgtgaagg

SEQ ID NO: 2386 - DNA, 23 bp, Homo sapiens
tggtggtcatatgtgtcttgggg

SEQ ID NO: 2387 - DNA, 23 bp, Homo sapiens
tggttagtcatatgcgttttggg

SEQ ID NO: 2388 - DNA, 23 bp, Homo sapiens
tggttgctactgtgatgtgtagg

SEQ ID NO: 2389 - DNA, 23 bp, Homo sapiens
tggttggtcggggccgggcaggg

SEQ ID NO: 2390 - DNA, 23 bp, Homo sapiens
tgtagaaatacctcaaggagtgg

SEQ ID NO: 2391 - DNA, 23 bp, Homo sapiens
tgtagaaatacctcatgaagtgg

SEQ ID NO: 2392 - DNA, 23 bp, Homo sapiens
tgtagaaatacctcatggagagg

SEQ ID NO: 2393 - DNA, 23 bp, Homo sapiens
tgtagcccacggcgatgaagcgg

SEQ ID NO: 2394 - DNA, 23 bp, Homo sapiens
tgtagccgcgcaggttccgcagg

SEQ ID NO: 2395 - DNA, 23 bp, Homo sapiens
tgtaggacagctgcctgtgtggg

SEQ ID NO: 2396 - DNA, 23 bp, Homo sapiens
tgtaggaggaagagctcaggtgg

SEQ ID NO: 2397 - DNA, 23 bp, Homo sapiens
tgtcctgtgagatcccagaaagg

SEQ ID NO: 2398 - DNA, 23 bp, Homo sapiens
tgtgagacccggcctcgctctgg

SEQ ID NO: 2399 - DNA, 23 bp, Homo sapiens
tgtgcagcacgaggggctgctgg

SEQ ID NO: 2400 - DNA, 23 bp, Homo sapiens
tgtgcagcacgaggggctgtcgg

SEQ ID NO: 2401 - DNA, 23 bp, Homo sapiens
tgtggagaccaagcctgcagggg

SEQ ID NO: 2402 - DNA, 23 bp, Homo sapiens
tgtgtctttgcggggtctgatgg

SEQ ID NO: 2403 - DNA, 23 bp, Homo sapiens
tgtgtgactgcagacccaggcgg

SEQ ID NO: 2404 - DNA, 23 bp, Homo sapiens
ttaacccatctcagggtgagggg

SEQ ID NO: 2405 - DNA, 23 bp, Homo sapiens
ttaagtctgtgtgttggtcttgg

SEQ ID NO: 2406 - DNA, 23 bp, Homo sapiens
ttaattgtcctagacagcagagg

SEQ ID NO: 2407 - DNA, 23 bp, Homo sapiens
ttagaccaccaagcacaagtggg

SEQ ID NO: 2408 - DNA, 23 bp, Homo sapiens
ttagaccgcggcggacatggcgg

SEQ ID NO: 2409 - DNA, 23 bp, Homo sapiens
ttagatcacccagcgcaagtggg

SEQ ID NO: 2410 - DNA, 23 bp, Homo sapiens
ttatcccaggtgcctgcgtccgg

SEQ ID NO: 2411 - DNA, 23 bp, Homo sapiens
ttatcccatctcagggtgagggg

SEQ ID NO: 2412 - DNA, 23 bp, Homo sapiens
ttcacatccgtgtcctggcccgg

SEQ ID NO: 2413 - DNA, 23 bp, Homo sapiens
ttcacattcgtgtcccggcccgg

SEQ ID NO: 2414 - DNA, 23 bp, Homo sapiens
ttcatatcactcacagtgagggg

SEQ ID NO: 2415 - DNA, 23 bp, Homo sapiens
ttcatggagtgggaggctggggg

SEQ ID NO: 2416 - DNA, 23 bp, Homo sapiens
ttccagcattcatgagtcggggg

SEQ ID NO: 2417 - DNA, 23 bp, Homo sapiens
ttcccccgactcatgaatgctgg

SEQ ID NO: 2418 - DNA, 23 bp, Homo sapiens
ttcctcgtgggaggccatcccgg

SEQ ID NO: 2419 - DNA, 23 bp, Homo sapiens
ttcctggaccgccgcggacacgg

SEQ ID NO: 2420 - DNA, 23 bp, Homo sapiens
ttcgaccactgcggcagctgtgg

SEQ ID NO: 2421 - DNA, 23 bp, Homo sapiens
ttcggggcggatatcggacccgg

SEQ ID NO: 2422 - DNA, 23 bp, Homo sapiens
ttcggtaaggagggggatgaggg

SEQ ID NO: 2423 - DNA, 23 bp, Homo sapiens
ttcgtgtcccggcccggccgcgg

SEQ ID NO: 2424 - DNA, 23 bp, Homo sapiens
ttctagaagtcccaggtcccggg

SEQ ID NO: 2425 - DNA, 23 bp, Homo sapiens
ttctcactccaattgggtgtcgg

SEQ ID NO: 2426 - DNA, 23 bp, Homo sapiens
ttctcactcccatcgggtgtcgg

SEQ ID NO: 2427 - DNA, 23 bp, Homo sapiens
ttctcactcctattgggtgtcgg

SEQ ID NO: 2428 - DNA, 23 bp, Homo sapiens
ttctcagctgctccgcctcacgg

SEQ ID NO: 2429 - DNA, 23 bp, Homo sapiens
ttctccacccacggcgcccgcgg

SEQ ID NO: 2430 - DNA, 23 bp, Homo sapiens
ttctccccagacgccgagaatgg

SEQ ID NO: 2431 - DNA, 23 bp, Homo sapiens
ttctccgctgctccgcctcacgg

SEQ ID NO: 2432 - DNA, 23 bp, Homo sapiens
ttctctcggtcagtctgtgatgg

SEQ ID NO: 2433 - DNA, 23 bp, Homo sapiens
ttctggaaggttccatcccctgg

SEQ ID NO: 2434 - DNA, 23 bp, Homo sapiens
ttctggtagggaaggggtgaggg

SEQ ID NO: 2435 - DNA, 23 bp, Homo sapiens
ttctgtttttgttctacctcagg

SEQ ID NO: 2436 - DNA, 23 bp, Homo sapiens
ttcttctccctcaagaccagagg

SEQ ID NO: 2437 - DNA, 23 bp, Homo sapiens
ttcttgtgggaggccagccccgg

SEQ ID NO: 2438 - DNA, 23 bp, Homo sapiens
ttctttttgggtccaagactagg

SEQ ID NO: 2439 - DNA, 23 bp, Homo sapiens
ttgagggagaagaatcctcctgg

SEQ ID NO: 2440 - DNA, 23 bp, Homo sapiens
ttgagtgtgaagcagagaacagg

SEQ ID NO: 2441 - DNA, 23 bp, Homo sapiens
ttgcctttcagtcccacacaagg

SEQ ID NO: 2442 - DNA, 23 bp, Homo sapiens
ttgctactgtgatgtgtaggagg

SEQ ID NO: 2443 - DNA, 23 bp, Homo sapiens
ttgctctatccatggcgcccggg

SEQ ID NO: 2444 - DNA, 23 bp, Homo sapiens
ttgcttcccacaggtggaaaagg

SEQ ID NO: 2445 - DNA, 23 bp, Homo sapiens
ttggggtctagagtgggcagggg

SEQ ID NO: 2446 - DNA, 23 bp, Homo sapiens
ttggtcttgaagatctgttccgg

SEQ ID NO: 2447 - DNA, 23 bp, Homo sapiens
ttggtgagtcatatgcgttttgg

SEQ ID NO: 2448 - DNA, 23 bp, Homo sapiens
ttgtctccctttcttgtgggagg

SEQ ID NO: 2449 - DNA, 23 bp, Homo sapiens
ttgtggagaccaagcctgcaggg

SEQ ID NO: 2450 - DNA, 23 bp, Homo sapiens
ttgtgtcgggtccttcttccggg

SEQ ID NO: 2451 - DNA, 23 bp, Homo sapiens
tttacatccgtgtcccggcccgg

SEQ ID NO: 2452 - DNA, 23 bp, Homo sapiens
tttcaactgctccgccacatggg

SEQ ID NO: 2453 - DNA, 23 bp, Homo sapiens
tttccagagagtgactctgaggg

SEQ ID NO: 2454 - DNA, 23 bp, Homo sapiens
tttcctcccttcctcgtgggagg

SEQ ID NO: 2455 - DNA, 23 bp, Homo sapiens
tttgaccacttcgaccactgcgg

SEQ ID NO: 2456 - DNA, 23 bp, Homo sapiens
tttgtgacttcaagggcctctgg

SEQ ID NO: 2457 - DNA, 23 bp, Homo sapiens
ttttcaagtcacaaagggaaggg

SEQ ID NO: 2458 - DNA, 23 bp, Homo sapiens
tttttcaagtcacaaagggaagg

SEQ ID NO: 2459 - DNA, 23 bp, Homo sapiens
tttttgggtccaagactaggagg

SEQ ID NO: 2460 - DNA, 23 bp, Homo sapiens
aaaaatccccccaggttggtcgg

SEQ ID NO: 2461 - DNA, 23 bp, Homo sapiens
aaaaatccccccgggtgggtcgg

SEQ ID NO: 2462 - DNA, 23 bp, Homo sapiens
aaaaatccccccgggttggtcgg

SEQ ID NO: 2463 - DNA, 23 bp, Homo sapiens
aaaaatctctgaaggaatgacgg

SEQ ID NO: 2464 - DNA, 23 bp, Homo sapiens
aaaaattcccccgggttggtcgg

SEQ ID NO: 2465 - DNA, 23 bp, Homo sapiens
aaaaggagggagctactctcagg

SEQ ID NO: 2466 - DNA, 23 bp, Homo sapiens
aaaaggagggagctgctctcagg

SEQ ID NO: 2467 - DNA, 23 bp, Homo sapiens
aaaaggagggagttacactcagg

SEQ ID NO: 2468 - DNA, 23 bp, Homo sapiens
aaaatccccccaggttggtcggg

SEQ ID NO: 2469 - DNA, 23 bp, Homo sapiens
aaaatccccccgggtgggtcggg

SEQ ID NO: 2470 - DNA, 23 bp, Homo sapiens
aaaatccccccgggttggtcggg

SEQ ID NO: 2471 - DNA, 23 bp, Homo sapiens
aaaatccccgcgggttgggcggg

SEQ ID NO: 2472 - DNA, 23 bp, Homo sapiens
aaaatccccgcgggttggtcagg

SEQ ID NO: 2473 - DNA, 23 bp, Homo sapiens
aaaatccccgcgggttggtcggg

SEQ ID NO: 2474 - DNA, 23 bp, Homo sapiens
aaaatctctgaaggaatgacggg

SEQ ID NO: 2475 - DNA, 23 bp, Homo sapiens
aaaatctctgaaggagtgacggg

SEQ ID NO: 2476 - DNA, 23 bp, Homo sapiens
aaaatgccctatgaggggactgg

SEQ ID NO: 2477 - DNA, 23 bp, Homo sapiens
aaaatgccctgtgaggggacagg

SEQ ID NO: 2478 - DNA, 23 bp, Homo sapiens
aaaatgccctgtgaggggactgg

SEQ ID NO: 2479 - DNA, 23 bp, Homo sapiens
aaaatgtcctgtgagggcactgg

SEQ ID NO: 2480 - DNA, 23 bp, Homo sapiens
aaaatgtcctgtgaggggactgg

SEQ ID NO: 2481 - DNA, 23 bp, Homo sapiens
aaaattcccccgggttggtcggg

SEQ ID NO: 2482 - DNA, 23 bp, Homo sapiens
aaaattctagtccctgaagaggg

SEQ ID NO: 2483 - DNA, 23 bp, Homo sapiens
aaacacagggaaagcagctgtgg

SEQ ID NO: 2484 - DNA, 23 bp, Homo sapiens
aaacacgaggaaagcaagtgtgg

SEQ ID NO: 2485 - DNA, 23 bp, Homo sapiens
aaacacggggaaagcagctgtgg

SEQ ID NO: 2486 - DNA, 23 bp, Homo sapiens
aaacatgaagaaagcagatgtgg

SEQ ID NO: 2487 - DNA, 23 bp, Homo sapiens
aaacatgaagaaagcaggtgtgg

SEQ ID NO: 2488 - DNA, 23 bp, Homo sapiens
aaacatggggaaagcagctgtgg

SEQ ID NO: 2489 - DNA, 23 bp, Homo sapiens
aaacatggggaaagcagttgtgg

SEQ ID NO: 2490 - DNA, 23 bp, Homo sapiens
aaaccgggtaaacgcgcctgggg

SEQ ID NO: 2491 - DNA, 23 bp, Homo sapiens
aaaccgggtaaaggcgactaggg

SEQ ID NO: 2492 - DNA, 23 bp, Homo sapiens
aaaccgggtaaaggcgactgggg

SEQ ID NO: 2493 - DNA, 23 bp, Homo sapiens
aaaccgggtaaaggtgactgggg

SEQ ID NO: 2494 - DNA, 23 bp, Homo sapiens
aaactcaggggagtgggagtggg

SEQ ID NO: 2495 - DNA, 23 bp, Homo sapiens
aaagaataggagattatcccagg

SEQ ID NO: 2496 - DNA, 23 bp, Homo sapiens
aaagcaggagcccttcagcaggg

SEQ ID NO: 2497 - DNA, 23 bp, Homo sapiens
aaagcccctcaccctgagatggg

SEQ ID NO: 2498 - DNA, 23 bp, Homo sapiens
aaagcccgcacgcacccaccggg

SEQ ID NO: 2499 - DNA, 23 bp, Homo sapiens
aaaggcgcctgggcctctcccgg

SEQ ID NO: 2500 - DNA, 23 bp, Homo sapiens
aaagtccccacgcacccacccgg

SEQ ID NO: 2501 - DNA, 23 bp, Homo sapiens
aaagtccccagtcacccacccgg

SEQ ID NO: 2502 - DNA, 23 bp, Homo sapiens
aaagtccgcacgcacccaccggg

SEQ ID NO: 2503 - DNA, 23 bp, Homo sapiens
aaagttcgagtctctgagcgggg

SEQ ID NO: 2504 - DNA, 23 bp, Homo sapiens
aaagttcgagtctctgagtgggg

SEQ ID NO: 2505 - DNA, 23 bp, Homo sapiens
aaagttctagtctctgagggagg

SEQ ID NO: 2506 - DNA, 23 bp, Homo sapiens
aaatccccccaggttggtcgggg

SEQ ID NO: 2507 - DNA, 23 bp, Homo sapiens
aaatccccccgggtgggtcgggg

SEQ ID NO: 2508 - DNA, 23 bp, Homo sapiens
aaatccccccgggttggtcgggg

SEQ ID NO: 2509 - DNA, 23 bp, Homo sapiens
aaatccccgcgggttgggcgggg

SEQ ID NO: 2510 - DNA, 23 bp, Homo sapiens
aaatccccgcgggttggtcaggg

SEQ ID NO: 2511 - DNA, 23 bp, Homo sapiens
aaatccccgcgggttggtcgggg

SEQ ID NO: 2512 - DNA, 23 bp, Homo sapiens
aaatgccctatgaggggactggg

SEQ ID NO: 2513 - DNA, 23 bp, Homo sapiens
aaatgccctgtgaggggacaggg

SEQ ID NO: 2514 - DNA, 23 bp, Homo sapiens
aaatgccctgtgaggggactggg

SEQ ID NO: 2515 - DNA, 23 bp, Homo sapiens
aaatgtcctgtgagggcactggg

SEQ ID NO: 2516 - DNA, 23 bp, Homo sapiens
aaatgtcctgtgaggggactggg

SEQ ID NO: 2517 - DNA, 23 bp, Homo sapiens
aaatgtgtgaatgcagacccagg

SEQ ID NO: 2518 - DNA, 23 bp, Homo sapiens
aaatgtgtgactgcagacccagg

SEQ ID NO: 2519 - DNA, 23 bp, Homo sapiens
aaattcccccgggttggtcgggg

SEQ ID NO: 2520 - DNA, 23 bp, Homo sapiens
aacaatgcccacgatggggacgg

SEQ ID NO: 2521 - DNA, 23 bp, Homo sapiens
aacaatgcccacgatggggatgg

SEQ ID NO: 2522 - DNA, 23 bp, Homo sapiens
aacacagggaaagcagctgtggg

SEQ ID NO: 2523 - DNA, 23 bp, Homo sapiens
aacacgaggaaagcaagtgtggg

SEQ ID NO: 2524 - DNA, 23 bp, Homo sapiens
aacacggggaaagcagctgtggg

SEQ ID NO: 2525 - DNA, 23 bp, Homo sapiens
aacaggaaagatgattggagagg

SEQ ID NO: 2526 - DNA, 23 bp, Homo sapiens
aacaggaaagatgattggggagg

SEQ ID NO: 2527 - DNA, 23 bp, Homo sapiens
aacatgaagaaagcagatgtggg

SEQ ID NO: 2528 - DNA, 23 bp, Homo sapiens
aacatgaagaaagcaggtgtggg

SEQ ID NO: 2529 - DNA, 23 bp, Homo sapiens
aacatggggaaagcagctgtggg

SEQ ID NO: 2530 - DNA, 23 bp, Homo sapiens
aacatggggaaagcagttgtggg

SEQ ID NO: 2531 - DNA, 23 bp, Homo sapiens
aaccactcatcagtattcgaggg

SEQ ID NO: 2532 - DNA, 23 bp, Homo sapiens
aaccagtcatcagtattcgaggg

SEQ ID NO: 2533 - DNA, 23 bp, Homo sapiens
aacccagggcccagcacctcagg

SEQ ID NO: 2534 - DNA, 23 bp, Homo sapiens
aaccccgcactcacaggcccagg

SEQ ID NO: 2535 - DNA, 23 bp, Homo sapiens
aaccccgcactcaccggcccagg

SEQ ID NO: 2536 - DNA, 23 bp, Homo sapiens
aaccccgcactcaccggtccagg

SEQ ID NO: 2537 - DNA, 23 bp, Homo sapiens
aacccgacacccaatgggagtgg

SEQ ID NO: 2538 - DNA, 23 bp, Homo sapiens
aacccgcccagaccctcgaccgg

SEQ ID NO: 2539 - DNA, 23 bp, Homo sapiens
aacccgcccagaccctcggccgg

SEQ ID NO: 2540 - DNA, 23 bp, Homo sapiens
aacccgcccgaccctcctcccgg

SEQ ID NO: 2541 - DNA, 23 bp, Homo sapiens
aaccctcatcctgctgctctcgg

SEQ ID NO: 2542 - DNA, 23 bp, Homo sapiens
aaccctcctcctgctactctcgg

SEQ ID NO: 2543 - DNA, 23 bp, Homo sapiens
aaccctcctcctgctactcttgg

SEQ ID NO: 2544 - DNA, 23 bp, Homo sapiens
aaccctcctcctgctgctctcgg

SEQ ID NO: 2545 - DNA, 23 bp, Homo sapiens
aaccctcctcctgctgctctggg

SEQ ID NO: 2546 - DNA, 23 bp, Homo sapiens
aaccctcgtcctgctactctcgg

SEQ ID NO: 2547 - DNA, 23 bp, Homo sapiens
aaccgtcctcctgctgctctcgg

SEQ ID NO: 2548 - DNA, 23 bp, Homo sapiens
aaccgtcctcctgctgctctggg

SEQ ID NO: 2549 - DNA, 23 bp, Homo sapiens
aacctcgcactcacaggcccagg

SEQ ID NO: 2550 - DNA, 23 bp, Homo sapiens
aacgagaagaagaggaaaatggg

SEQ ID NO: 2551 - DNA, 23 bp, Homo sapiens
aacgaggtgcccgcccggcgagg

SEQ ID NO: 2552 - DNA, 23 bp, Homo sapiens
aacgatgcccaagttggggatgg

SEQ ID NO: 2553 - DNA, 23 bp, Homo sapiens
aacgatgcccacgatggggatgg

SEQ ID NO: 2554 - DNA, 23 bp, Homo sapiens
aacgatgcccatgatggggatgg

SEQ ID NO: 2555 - DNA, 23 bp, Homo sapiens
aacgcgcctggggctctcgccgg

SEQ ID NO: 2556 - DNA, 23 bp, Homo sapiens
aacggacaggacacctggggtgg

SEQ ID NO: 2557 - DNA, 23 bp, Homo sapiens
aactcaggacaccgagcttgtgg

SEQ ID NO: 2558 - DNA, 23 bp, Homo sapiens
aactcaggacactgagcttgtgg

SEQ ID NO: 2559 - DNA, 23 bp, Homo sapiens
aactcaggggagtgggagtgggg

SEQ ID NO: 2560 - DNA, 23 bp, Homo sapiens
aagaaaagtcatggttcccaagg

SEQ ID NO: 2561 - DNA, 23 bp, Homo sapiens
aagaaagcagatgtgggccctgg

SEQ ID NO: 2562 - DNA, 23 bp, Homo sapiens
aagaaagcaggtgtgggtcctgg

SEQ ID NO: 2563 - DNA, 23 bp, Homo sapiens
aagaagacgctgcagcgcgcggg

SEQ ID NO: 2564 - DNA, 23 bp, Homo sapiens
aagaagagctcaggtggagaagg

SEQ ID NO: 2565 - DNA, 23 bp, Homo sapiens
aagaaggacccgacacaagttgg

SEQ ID NO: 2566 - DNA, 23 bp, Homo sapiens
aagaaggacccgacacaggttgg

SEQ ID NO: 2567 - DNA, 23 bp, Homo sapiens
aagaaggacccgacataggttgg

SEQ ID NO: 2568 - DNA, 23 bp, Homo sapiens
aagaaggacccgacgcaggttgg

SEQ ID NO: 2569 - DNA, 23 bp, Homo sapiens
aagaaggacccgtcgcaggttgg

SEQ ID NO: 2570 - DNA, 23 bp, Homo sapiens
aagaaggaccctacataggttgg

SEQ ID NO: 2571 - DNA, 23 bp, Homo sapiens
aagacactgattggcttctctgg

SEQ ID NO: 2572 - DNA, 23 bp, Homo sapiens
aagacagctctgggaaaagaggg

SEQ ID NO: 2573 - DNA, 23 bp, Homo sapiens
aagacccgggaagccgcgccggg

SEQ ID NO: 2574 - DNA, 23 bp, Homo sapiens
aagacctggtcagagcccacagg

SEQ ID NO: 2575 - DNA, 23 bp, Homo sapiens
aagacctggtcagagcccgcagg

SEQ ID NO: 2576 - DNA, 23 bp, Homo sapiens
aagacggctctgggaaaagaggg

SEQ ID NO: 2577 - DNA, 23 bp, Homo sapiens
aagacggctctgggaaaggaagg

SEQ ID NO: 2578 - DNA, 23 bp, Homo sapiens
aagacggctctgggaaaggaggg

SEQ ID NO: 2579 - DNA, 23 bp, Homo sapiens
aagagcccctcaccctgagctgg

SEQ ID NO: 2580 - DNA, 23 bp, Homo sapiens
aagagcgcaggtcctcgttcagg

SEQ ID NO: 2581 - DNA, 23 bp, Homo sapiens
aagagcgcaggtcctctttcagg

SEQ ID NO: 2582 - DNA, 23 bp, Homo sapiens
aagagctcaggtggggtgaaggg

SEQ ID NO: 2583 - DNA, 23 bp, Homo sapiens
aagagggtcatggtggacatcgg

SEQ ID NO: 2584 - DNA, 23 bp, Homo sapiens
aagagggtcatggtggacatggg

SEQ ID NO: 2585 - DNA, 23 bp, Homo sapiens
aagagtaagtgctggcacacagg

SEQ ID NO: 2586 - DNA, 23 bp, Homo sapiens
aagagtaagttctggcacacagg

SEQ ID NO: 2587 - DNA, 23 bp, Homo sapiens
aagatggccctgggaaaggaggg

SEQ ID NO: 2588 - DNA, 23 bp, Homo sapiens
aagatggctctgggaaaagaggg

SEQ ID NO: 2589 - DNA, 23 bp, Homo sapiens
aagatggctctgggaaaggaggg

SEQ ID NO: 2590 - DNA, 23 bp, Homo sapiens
aagcaacgggcccgcctggcggg

SEQ ID NO: 2591 - DNA, 23 bp, Homo sapiens
aagcaaggggcccgcccggcggg

SEQ ID NO: 2592 - DNA, 23 bp, Homo sapiens
aagcaaggggcccgcctggcggg

SEQ ID NO: 2593 - DNA, 23 bp, Homo sapiens
aagcaaggggccctcctggcggg

SEQ ID NO: 2594 - DNA, 23 bp, Homo sapiens
aagccccgcttcatcgccgtggg

SEQ ID NO: 2595 - DNA, 23 bp, Homo sapiens
aagcccctcaccctgagatgggg

SEQ ID NO: 2596 - DNA, 23 bp, Homo sapiens
aagcggggctccccgcggccagg

SEQ ID NO: 2597 - DNA, 23 bp, Homo sapiens
aagcggggctccccgcggccggg

SEQ ID NO: 2598 - DNA, 23 bp, Homo sapiens
aagcggggctctccactgccggg

SEQ ID NO: 2599 - DNA, 23 bp, Homo sapiens
aagcggggctctccgcggccagg

SEQ ID NO: 2600 - DNA, 23 bp, Homo sapiens
aagcggggctctccgcggccggg

SEQ ID NO: 2601 - DNA, 23 bp, Homo sapiens
aagcggggcttcccgcggccggg

SEQ ID NO: 2602 - DNA, 23 bp, Homo sapiens
aagcgtcctgccggtacccgcgg

SEQ ID NO: 2603 - DNA, 23 bp, Homo sapiens
aagcgtcctgctggtacccgcgg

SEQ ID NO: 2604 - DNA, 23 bp, Homo sapiens
aaggacaagctggagcgcgctgg

SEQ ID NO: 2605 - DNA, 23 bp, Homo sapiens
aaggacacgctggagcgcgcggg

SEQ ID NO: 2606 - DNA, 23 bp, Homo sapiens
aaggagacgctgcagcgcacggg

SEQ ID NO: 2607 - DNA, 23 bp, Homo sapiens
aaggagacgctgcagcgcgcagg

SEQ ID NO: 2608 - DNA, 23 bp, Homo sapiens
aaggagacgctgcagcgcgcggg

SEQ ID NO: 2609 - DNA, 23 bp, Homo sapiens
aaggatgcccacgatggggatgg

SEQ ID NO: 2610 - DNA, 23 bp, Homo sapiens
aaggcctgagaggaaagtcacgg

SEQ ID NO: 2611 - DNA, 23 bp, Homo sapiens
aaggcgactagggctctctccgg

SEQ ID NO: 2612 - DNA, 23 bp, Homo sapiens
aaggcgactggggctctctccgg

SEQ ID NO: 2613 - DNA, 23 bp, Homo sapiens
aaggcgcctgggcctctcccggg

SEQ ID NO: 2614 - DNA, 23 bp, Homo sapiens
aaggctgctgcaggggtcaaagg

SEQ ID NO: 2615 - DNA, 23 bp, Homo sapiens
aaggctgctgccggtgtcaaagg

SEQ ID NO: 2616 - DNA, 23 bp, Homo sapiens
aaggggtgaagagcggggtctgg

SEQ ID NO: 2617 - DNA, 23 bp, Homo sapiens
aaggggtgaggagtggggtctgg

SEQ ID NO: 2618 - DNA, 23 bp, Homo sapiens
aaggggtgaggggtggggtctgg

SEQ ID NO: 2619 - DNA, 23 bp, Homo sapiens
aaggtgactggggctctctccgg

SEQ ID NO: 2620 - DNA, 23 bp, Homo sapiens
aagtaccagggccccaggcgtgg

SEQ ID NO: 2621 - DNA, 23 bp, Homo sapiens
aagtcccagggccccaggcgtgg

SEQ ID NO: 2622 - DNA, 23 bp, Homo sapiens
aagtccctgaggaaatggagggg

SEQ ID NO: 2623 - DNA, 23 bp, Homo sapiens
aagtcctggagcccttcagccgg

SEQ ID NO: 2624 - DNA, 23 bp, Homo sapiens
aagtcctggagcccttcagctgg

SEQ ID NO: 2625 - DNA, 23 bp, Homo sapiens
aagtccttgaggaaatggagggg

SEQ ID NO: 2626 - DNA, 23 bp, Homo sapiens
aagtcgctgttccctcctcaggg

SEQ ID NO: 2627 - DNA, 23 bp, Homo sapiens
aagtcgctgttccctcttcaggg

SEQ ID NO: 2628 - DNA, 23 bp, Homo sapiens
aagtcgctgttcccttctcaggg

SEQ ID NO: 2629 - DNA, 23 bp, Homo sapiens
aagtctctgaggaaatggagggg

SEQ ID NO: 2630 - DNA, 23 bp, Homo sapiens
aagtgaaactcaggggagtgggg

SEQ ID NO: 2631 - DNA, 23 bp, Homo sapiens
aagtgaaactcgtgggagtgggg

SEQ ID NO: 2632 - DNA, 23 bp, Homo sapiens
aagtgatggcagtgggcgtgtgg

SEQ ID NO: 2633 - DNA, 23 bp, Homo sapiens
aagtgatggcggcaggcgtgtgg

SEQ ID NO: 2634 - DNA, 23 bp, Homo sapiens
aagtgatggcggcgggcgtgtgg

SEQ ID NO: 2635 - DNA, 23 bp, Homo sapiens
aagtgatggcggtgggcgtgtgg

SEQ ID NO: 2636 - DNA, 23 bp, Homo sapiens
aagtgatgggggcgggagtgtgg

SEQ ID NO: 2637 - DNA, 23 bp, Homo sapiens
aagtgatgggggtgggagtgtgg

SEQ ID NO: 2638 - DNA, 23 bp, Homo sapiens
aagtggggctccccgcggccggg

SEQ ID NO: 2639 - DNA, 23 bp, Homo sapiens
aagtggggctctccgcggccggg

SEQ ID NO: 2640 - DNA, 23 bp, Homo sapiens
aagtggggctctccgcggctggg

SEQ ID NO: 2641 - DNA, 23 bp, Homo sapiens
aagtggtgggggtgggagtgtgg

SEQ ID NO: 2642 - DNA, 23 bp, Homo sapiens
aatatgtatggctgcgacgtggg

SEQ ID NO: 2643 - DNA, 23 bp, Homo sapiens
aatcactgggatattgtgtttgg

SEQ ID NO: 2644 - DNA, 23 bp, Homo sapiens
aatcagcgtctacgcagtcccgg

SEQ ID NO: 2645 - DNA, 23 bp, Homo sapiens
aatcagcgtctccgcagtcccgg

SEQ ID NO: 2646 - DNA, 23 bp, Homo sapiens
aatcagtgtcgtcgcggtcgcgg

SEQ ID NO: 2647 - DNA, 23 bp, Homo sapiens
aatcatgggcccacccagcctgg

SEQ ID NO: 2648 - DNA, 23 bp, Homo sapiens
aatcatgggccgacccagcctgg

SEQ ID NO: 2649 - DNA, 23 bp, Homo sapiens
aatcatgggcctacccagcctgg

SEQ ID NO: 2650 - DNA, 23 bp, Homo sapiens
aatcatgggcctacccagtctgg

SEQ ID NO: 2651 - DNA, 23 bp, Homo sapiens
aatccgacacccaatgggagtgg

SEQ ID NO: 2652 - DNA, 23 bp, Homo sapiens
aatccgcccagaccctcgaccgg

SEQ ID NO: 2653 - DNA, 23 bp, Homo sapiens
aatctgtccttcattgtcacagg

SEQ ID NO: 2654 - DNA, 23 bp, Homo sapiens
aatctgtccttcattttaacagg

SEQ ID NO: 2655 - DNA, 23 bp, Homo sapiens
aatcttctattccctgagaaggg

SEQ ID NO: 2656 - DNA, 23 bp, Homo sapiens
aatcttctattccctgaggaggg

SEQ ID NO: 2657 - DNA, 23 bp, Homo sapiens
aatgaataggagattatcccagg

SEQ ID NO: 2658 - DNA, 23 bp, Homo sapiens
aatgatgcccacaatggggatgg

SEQ ID NO: 2659 - DNA, 23 bp, Homo sapiens
aatgatgcccacgatggggacgg

SEQ ID NO: 2660 - DNA, 23 bp, Homo sapiens
aatgatgcccacgatggggatgg

SEQ ID NO: 2661 - DNA, 23 bp, Homo sapiens
aatgatgcccacgatgtggacgg

SEQ ID NO: 2662 - DNA, 23 bp, Homo sapiens
aatgcccacgatggggacggtgg

SEQ ID NO: 2663 - DNA, 23 bp, Homo sapiens
aatgcccacgatggggatggtgg

SEQ ID NO: 2664 - DNA, 23 bp, Homo sapiens
aatggacaggacacccgggatgg

SEQ ID NO: 2665 - DNA, 23 bp, Homo sapiens
aatggacaggacacctgggatgg

SEQ ID NO: 2666 - DNA, 23 bp, Homo sapiens
aatggacaggacacctggggtgg

SEQ ID NO: 2667 - DNA, 23 bp, Homo sapiens
aatggacaggacacctggtgtgg

SEQ ID NO: 2668 - DNA, 23 bp, Homo sapiens
aatggacgggacacctggggtgg

SEQ ID NO: 2669 - DNA, 23 bp, Homo sapiens
aatggccacatgcgtgctggtgg

SEQ ID NO: 2670 - DNA, 23 bp, Homo sapiens
aatgggcaggacacctggggtgg

SEQ ID NO: 2671 - DNA, 23 bp, Homo sapiens
aatggggaggcgcagcgttgggg

SEQ ID NO: 2672 - DNA, 23 bp, Homo sapiens
aatgtgccctgtctcattactgg

SEQ ID NO: 2673 - DNA, 23 bp, Homo sapiens
aatgtgccctgtctcattcctgg

SEQ ID NO: 2674 - DNA, 23 bp, Homo sapiens
aatgtgtgaatgcagacccaggg

SEQ ID NO: 2675 - DNA, 23 bp, Homo sapiens
aatgtgtgactgcagacccaggg

SEQ ID NO: 2676 - DNA, 23 bp, Homo sapiens
aatgtgtgttgggtgttgggcgg

SEQ ID NO: 2677 - DNA, 23 bp, Homo sapiens
aattatgagcctacccagcctgg

SEQ ID NO: 2678 - DNA, 23 bp, Homo sapiens
aattatgggcctacccagcctgg

SEQ ID NO: 2679 - DNA, 23 bp, Homo sapiens
aattcatatccatcacagtgagg

SEQ ID NO: 2680 - DNA, 23 bp, Homo sapiens
aattcgtatctgtcacagtgagg

SEQ ID NO: 2681 - DNA, 23 bp, Homo sapiens
aattgagtcagagagcagggcgg

SEQ ID NO: 2682 - DNA, 23 bp, Homo sapiens
aattgtcctagagagaagagggg

SEQ ID NO: 2683 - DNA, 23 bp, Homo sapiens
aattgtcctagagagcagacggg

SEQ ID NO: 2684 - DNA, 23 bp, Homo sapiens
aattgtcctagagagcagagggg

SEQ ID NO: 2685 - DNA, 23 bp, Homo sapiens
aattgtctagagagaagaggggg

SEQ ID NO: 2686 - DNA, 23 bp, Homo sapiens
aattgtgtcacagagcagggcgg

SEQ ID NO: 2687 - DNA, 23 bp, Homo sapiens
aattgtgtcagagagcagggcgg

SEQ ID NO: 2688 - DNA, 23 bp, Homo sapiens
acaagaacacagacacatgcagg

SEQ ID NO: 2689 - DNA, 23 bp, Homo sapiens
acaagggtctcggagtcccgcgg

SEQ ID NO: 2690 - DNA, 23 bp, Homo sapiens
acaatatcccagtgatttcttgg

SEQ ID NO: 2691 - DNA, 23 bp, Homo sapiens
acacacacaggcagcagccttgg

SEQ ID NO: 2692 - DNA, 23 bp, Homo sapiens
acacacaccggcagcagccttgg

SEQ ID NO: 2693 - DNA, 23 bp, Homo sapiens
acacacaccggcggcagccttgg

SEQ ID NO: 2694 - DNA, 23 bp, Homo sapiens
acacagctccaaagagaactagg

SEQ ID NO: 2695 - DNA, 23 bp, Homo sapiens
acacagggcccagactgggtagg

SEQ ID NO: 2696 - DNA, 23 bp, Homo sapiens
acacagggcccaggctgggtagg

SEQ ID NO: 2697 - DNA, 23 bp, Homo sapiens
acacagggcccaggctgggtcgg

SEQ ID NO: 2698 - DNA, 23 bp, Homo sapiens
acacagggcccaggctgggtggg

SEQ ID NO: 2699 - DNA, 23 bp, Homo sapiens
acacaggggctaacacagcctgg

SEQ ID NO: 2700 - DNA, 23 bp, Homo sapiens
acacaggggctaacgcagactgg

SEQ ID NO: 2701 - DNA, 23 bp, Homo sapiens
acacaggggctaacgcagcctgg

SEQ ID NO: 2702 - DNA, 23 bp, Homo sapiens
acacaggggctaatgcagcctgg

SEQ ID NO: 2703 - DNA, 23 bp, Homo sapiens
acacatgggccatcccagcctgg

SEQ ID NO: 2704 - DNA, 23 bp, Homo sapiens
acacatgtgacaatgaaggacgg

SEQ ID NO: 2705 - DNA, 23 bp, Homo sapiens
acaccgagcttgtggagaccagg

SEQ ID NO: 2706 - DNA, 23 bp, Homo sapiens
acacctcagccccacctctctgg

SEQ ID NO: 2707 - DNA, 23 bp, Homo sapiens
acacctgggccatcccagcctgg

SEQ ID NO: 2708 - DNA, 23 bp, Homo sapiens
acacgaacacagacacatgcagg

SEQ ID NO: 2709 - DNA, 23 bp, Homo sapiens
acacggagctcgtggagaccagg

SEQ ID NO: 2710 - DNA, 23 bp, Homo sapiens
acacggagcttgtggagaccagg

SEQ ID NO: 2711 - DNA, 23 bp, Homo sapiens
acacgtgggccatcccagcctgg

SEQ ID NO: 2712 - DNA, 23 bp, Homo sapiens
acactccaccagcacgcatgtgg

SEQ ID NO: 2713 - DNA, 23 bp, Homo sapiens
acactccaccagcatgcatgtgg

SEQ ID NO: 2714 - DNA, 23 bp, Homo sapiens
acactcctccagcacacatgtgg

SEQ ID NO: 2715 - DNA, 23 bp, Homo sapiens
acactgacctggcagcgggatgg

SEQ ID NO: 2716 - DNA, 23 bp, Homo sapiens
acactgacctggcagtgggatgg

SEQ ID NO: 2717 - DNA, 23 bp, Homo sapiens
acactgagcttgtggagaccagg

SEQ ID NO: 2718 - DNA, 23 bp, Homo sapiens
acagaacatgtggctagaggagg

SEQ ID NO: 2719 - DNA, 23 bp, Homo sapiens
acagaacccagacaccagcctgg

SEQ ID NO: 2720 - DNA, 23 bp, Homo sapiens
acagaacccagacgccagcctgg

SEQ ID NO: 2721 - DNA, 23 bp, Homo sapiens
acagaagatgtggctagaggagg

SEQ ID NO: 2722 - DNA, 23 bp, Homo sapiens
acagaatctggaaacccaggagg

SEQ ID NO: 2723 - DNA, 23 bp, Homo sapiens
acagacctcaggagggcggttgg

SEQ ID NO: 2724 - DNA, 23 bp, Homo sapiens
acagacctcaggagggctattgg

SEQ ID NO: 2725 - DNA, 23 bp, Homo sapiens
acagaccttaggagagcagttgg

SEQ ID NO: 2726 - DNA, 23 bp, Homo sapiens
acagaccttaggagggcagttgg

SEQ ID NO: 2727 - DNA, 23 bp, Homo sapiens
acagactaaccgagcgaacctgg

SEQ ID NO: 2728 - DNA, 23 bp, Homo sapiens
acagactcaccgagtggacctgg

SEQ ID NO: 2729 - DNA, 23 bp, Homo sapiens
acagactgaccgagagaacctgg

SEQ ID NO: 2730 - DNA, 23 bp, Homo sapiens
acagactgaccgagcgaacctgg

SEQ ID NO: 2731 - DNA, 23 bp, Homo sapiens
acagactgaccgagtggacctgg

SEQ ID NO: 2732 - DNA, 23 bp, Homo sapiens
acagatctcaggagggcgattgg

SEQ ID NO: 2733 - DNA, 23 bp, Homo sapiens
acagattgaccgagtggacctgg

SEQ ID NO: 2734 - DNA, 23 bp, Homo sapiens
acagcacgcctacgacggcaagg

SEQ ID NO: 2735 - DNA, 23 bp, Homo sapiens
acagcgacgccacgagtccgagg

SEQ ID NO: 2736 - DNA, 23 bp, Homo sapiens
acagcgacgccgcgagccagagg

SEQ ID NO: 2737 - DNA, 23 bp, Homo sapiens
acagcgacgccgcgagccggagg

SEQ ID NO: 2738 - DNA, 23 bp, Homo sapiens
acagcgacgccgcgagtccgagg

SEQ ID NO: 2739 - DNA, 23 bp, Homo sapiens
acagctgtggtggtgccttctgg

SEQ ID NO: 2740 - DNA, 23 bp, Homo sapiens
acaggaaagatgattggagaggg

SEQ ID NO: 2741 - DNA, 23 bp, Homo sapiens
acaggaaagatgattggggaggg

SEQ ID NO: 2742 - DNA, 23 bp, Homo sapiens
acaggaacgcagacacattcagg

SEQ ID NO: 2743 - DNA, 23 bp, Homo sapiens
acaggacattttcttcccacagg

SEQ ID NO: 2744 - DNA, 23 bp, Homo sapiens
acaggatctggaaacccaggagg

SEQ ID NO: 2745 - DNA, 23 bp, Homo sapiens
acaggcccaggtctcggtcaggg

SEQ ID NO: 2746 - DNA, 23 bp, Homo sapiens
acagggacacagacacattcagg

SEQ ID NO: 2747 - DNA, 23 bp, Homo sapiens
acagggacgcagacacattcagg

SEQ ID NO: 2748 - DNA, 23 bp, Homo sapiens
acagggcacatttctagctgggg

SEQ ID NO: 2749 - DNA, 23 bp, Homo sapiens
acagggcattttcttcccacagg

SEQ ID NO: 2750 - DNA, 23 bp, Homo sapiens
acatagctccaaagagaactagg

SEQ ID NO: 2751 - DNA, 23 bp, Homo sapiens
acatgaacacagacacatgcagg

SEQ ID NO: 2752 - DNA, 23 bp, Homo sapiens
acatgccatgtacagcatgaggg

SEQ ID NO: 2753 - DNA, 23 bp, Homo sapiens
acatgtggctatcttgagaatgg

SEQ ID NO: 2754 - DNA, 23 bp, Homo sapiens
acatttctggaaacttctctggg

SEQ ID NO: 2755 - DNA, 23 bp, Homo sapiens
accacatccgtgtcccggcccgg

SEQ ID NO: 2756 - DNA, 23 bp, Homo sapiens
accagcagtcacaagtcacaggg

SEQ ID NO: 2757 - DNA, 23 bp, Homo sapiens
accagcccaggtctcggtcaggg

SEQ ID NO: 2758 - DNA, 23 bp, Homo sapiens
accagcggatgcaggcacctggg

SEQ ID NO: 2759 - DNA, 23 bp, Homo sapiens
acccaatgggagtgagaactggg

SEQ ID NO: 2760 - DNA, 23 bp, Homo sapiens
acccaatgggagtgggaaatggg

SEQ ID NO: 2761 - DNA, 23 bp, Homo sapiens
acccaatgggagtgggaagtggg

SEQ ID NO: 2762 - DNA, 23 bp, Homo sapiens
acccaatgggagtgggaattggg

SEQ ID NO: 2763 - DNA, 23 bp, Homo sapiens
acccagacaccagcggatgcagg

SEQ ID NO: 2764 - DNA, 23 bp, Homo sapiens
acccagaccagcctggacacagg

SEQ ID NO: 2765 - DNA, 23 bp, Homo sapiens
acccagggcccagcacctcaggg

SEQ ID NO: 2766 - DNA, 23 bp, Homo sapiens
acccagttctcactcccattggg

SEQ ID NO: 2767 - DNA, 23 bp, Homo sapiens
acccctcatcccccacggacggg

SEQ ID NO: 2768 - DNA, 23 bp, Homo sapiens
acccctcatcccctacggacggg

SEQ ID NO: 2769 - DNA, 23 bp, Homo sapiens
acccgacacccaatgggagtggg

SEQ ID NO: 2770 - DNA, 23 bp, Homo sapiens
acccgaccctcctcccggcgcgg

SEQ ID NO: 2771 - DNA, 23 bp, Homo sapiens
acccgcccaggtctgggtcaggg

SEQ ID NO: 2772 - DNA, 23 bp, Homo sapiens
acccgccctggtctgggtcaggg

SEQ ID NO: 2773 - DNA, 23 bp, Homo sapiens
acccgcggaggaggcgcccgtgg

SEQ ID NO: 2774 - DNA, 23 bp, Homo sapiens
acccgggaagccgcgccgggagg

SEQ ID NO: 2775 - DNA, 23 bp, Homo sapiens
acccgggaagccgcgcctggagg

SEQ ID NO: 2776 - DNA, 23 bp, Homo sapiens
acccggggagccgcgcagggagg

SEQ ID NO: 2777 - DNA, 23 bp, Homo sapiens
acccggggagccgcgccgggagg

SEQ ID NO: 2778 - DNA, 23 bp, Homo sapiens
acccggggagcggcgcagggagg

SEQ ID NO: 2779 - DNA, 23 bp, Homo sapiens
acccgggtagccgcgccgggagg

SEQ ID NO: 2780 - DNA, 23 bp, Homo sapiens
accctacataggttggcagaggg

SEQ ID NO: 2781 - DNA, 23 bp, Homo sapiens
accctacataggttgggagaggg

SEQ ID NO: 2782 - DNA, 23 bp, Homo sapiens
accctacgtaggttgggagaggg

SEQ ID NO: 2783 - DNA, 23 bp, Homo sapiens
accctcatcctgctgctctcggg

SEQ ID NO: 2784 - DNA, 23 bp, Homo sapiens
accctcatgctgcacatggcagg

SEQ ID NO: 2785 - DNA, 23 bp, Homo sapiens
accctcctcctgctactctcggg

SEQ ID NO: 2786 - DNA, 23 bp, Homo sapiens
accctcctcctgctactcttggg

SEQ ID NO: 2787 - DNA, 23 bp, Homo sapiens
accctcctcctgctgctctcggg

SEQ ID NO: 2788 - DNA, 23 bp, Homo sapiens
accctcctcctgctgctctgggg

SEQ ID NO: 2789 - DNA, 23 bp, Homo sapiens
accctcgtcctgctactctcggg

SEQ ID NO: 2790 - DNA, 23 bp, Homo sapiens
accctgagatggagtaaggaggg

SEQ ID NO: 2791 - DNA, 23 bp, Homo sapiens
accctgagatggggtaaggaggg

SEQ ID NO: 2792 - DNA, 23 bp, Homo sapiens
accctgagctggggtaaggaggg

SEQ ID NO: 2793 - DNA, 23 bp, Homo sapiens
accctgaggtgctgggccctggg

SEQ ID NO: 2794 - DNA, 23 bp, Homo sapiens
accggcccaggtctcgatcaggg

SEQ ID NO: 2795 - DNA, 23 bp, Homo sapiens
accggcccaggtctcggtcaggg

SEQ ID NO: 2796 - DNA, 23 bp, Homo sapiens
accgggctgaccacgggggcggg

SEQ ID NO: 2797 - DNA, 23 bp, Homo sapiens
accgggctgaccgcggggtccgg

SEQ ID NO: 2798 - DNA, 23 bp, Homo sapiens
accgggctgaccgcggggtcggg

SEQ ID NO: 2799 - DNA, 23 bp, Homo sapiens
accgggctgacctcggggtccgg

SEQ ID NO: 2800 - DNA, 23 bp, Homo sapiens
accgggggagccgcgccgggagg

SEQ ID NO: 2801 - DNA, 23 bp, Homo sapiens
accggtccaggtctcgatcaggg

SEQ ID NO: 2802 - DNA, 23 bp, Homo sapiens
accgtcctcctgctgctctcggg

SEQ ID NO: 2803 - DNA, 23 bp, Homo sapiens
accgtcctcctgctgctctgggg

SEQ ID NO: 2804 - DNA, 23 bp, Homo sapiens
acctaatgtgtgttgggtgttgg

SEQ ID NO: 2805 - DNA, 23 bp, Homo sapiens
acctcatggagtgagagcctggg

SEQ ID NO: 2806 - DNA, 23 bp, Homo sapiens
acctcatggagtgggagactggg

SEQ ID NO: 2807 - DNA, 23 bp, Homo sapiens
acctcatggagtgggagcctggg

SEQ ID NO: 2808 - DNA, 23 bp, Homo sapiens
acctcatggattgggagcctggg

SEQ ID NO: 2809 - DNA, 23 bp, Homo sapiens
acctccctgcgcggctccccggg

SEQ ID NO: 2810 - DNA, 23 bp, Homo sapiens
acctcgatggttgtggtgttggg

SEQ ID NO: 2811 - DNA, 23 bp, Homo sapiens
acctctcatcccccacggacggg

SEQ ID NO: 2812 - DNA, 23 bp, Homo sapiens
acctgaggagccgcgccgggagg

SEQ ID NO: 2813 - DNA, 23 bp, Homo sapiens
acctgccatgtgcagcatgaggg

SEQ ID NO: 2814 - DNA, 23 bp, Homo sapiens
acctgcccaggtctgggtcaggg

SEQ ID NO: 2815 - DNA, 23 bp, Homo sapiens
acctgcgcggctactacaaccgg

SEQ ID NO: 2816 - DNA, 23 bp, Homo sapiens
acctggatgatgtgagaccctgg

SEQ ID NO: 2817 - DNA, 23 bp, Homo sapiens
acctgggataatctattcattgg

SEQ ID NO: 2818 - DNA, 23 bp, Homo sapiens
accttgatgattatggtgttggg

SEQ ID NO: 2819 - DNA, 23 bp, Homo sapiens
accttgatggttgtggtgttggg

SEQ ID NO: 2820 - DNA, 23 bp, Homo sapiens
accttgattacagcggtgatggg

SEQ ID NO: 2821 - DNA, 23 bp, Homo sapiens
accttgattacggcagtgatggg

SEQ ID NO: 2822 - DNA, 23 bp, Homo sapiens
accttgattacggcggtgatggg

SEQ ID NO: 2823 - DNA, 23 bp, Homo sapiens
accttgattatggcggtgatggg

SEQ ID NO: 2824 - DNA, 23 bp, Homo sapiens
accttggggtggatctcagacgg

SEQ ID NO: 2825 - DNA, 23 bp, Homo sapiens
accttggtggttgtggtgttggg

SEQ ID NO: 2826 - DNA, 23 bp, Homo sapiens
acgaagtcccaggccccgggcgg

SEQ ID NO: 2827 - DNA, 23 bp, Homo sapiens
acgaagtcccaggtcccggacgg

SEQ ID NO: 2828 - DNA, 23 bp, Homo sapiens
acgaagtcccaggtcccgggcgg

SEQ ID NO: 2829 - DNA, 23 bp, Homo sapiens
acgaagtcccatgtcccggacgg

SEQ ID NO: 2830 - DNA, 23 bp, Homo sapiens
acgacactgattggcttctctgg

SEQ ID NO: 2831 - DNA, 23 bp, Homo sapiens
acgaggtgcccgcccggcgaggg

SEQ ID NO: 2832 - DNA, 23 bp, Homo sapiens
acgatgtacggctgcgacgtggg

SEQ ID NO: 2833 - DNA, 23 bp, Homo sapiens
acgatgtatggctgcgacctggg

SEQ ID NO: 2834 - DNA, 23 bp, Homo sapiens
acgatgtatggctgcgacgtggg

SEQ ID NO: 2835 - DNA, 23 bp, Homo sapiens
acgctgcagcgcacgggtaccgg

SEQ ID NO: 2836 - DNA, 23 bp, Homo sapiens
acggaataggagattatcccagg

SEQ ID NO: 2837 - DNA, 23 bp, Homo sapiens
acggacaggacacctggggtggg

SEQ ID NO: 2838 - DNA, 23 bp, Homo sapiens
acggccatcctcggcgtctgggg

SEQ ID NO: 2839 - DNA, 23 bp, Homo sapiens
acggccatcctcggggtctgggg

SEQ ID NO: 2840 - DNA, 23 bp, Homo sapiens
acgggctgaccacgggggcgggg

SEQ ID NO: 2841 - DNA, 23 bp, Homo sapiens
acggggctgaccacgggggcggg

SEQ ID NO: 2842 - DNA, 23 bp, Homo sapiens
acggggctgaccgcggggccggg

SEQ ID NO: 2843 - DNA, 23 bp, Homo sapiens
acggggctgaccgcggggcctgg

SEQ ID NO: 2844 - DNA, 23 bp, Homo sapiens
acggggctgaccgcgggggcggg

SEQ ID NO: 2845 - DNA, 23 bp, Homo sapiens
acgggggtgtcatgtcttttagg

SEQ ID NO: 2846 - DNA, 23 bp, Homo sapiens
acggtgagtgaccccggcccggg

SEQ ID NO: 2847 - DNA, 23 bp, Homo sapiens
acggtgctgaccgcggggccggg

SEQ ID NO: 2848 - DNA, 23 bp, Homo sapiens
acggttcccaaggctgctgcagg

SEQ ID NO: 2849 - DNA, 23 bp, Homo sapiens
acgtctctgaggaaatggagggg

SEQ ID NO: 2850 - DNA, 23 bp, Homo sapiens
acgtctctgaggaaatgtagggg

SEQ ID NO: 2851 - DNA, 23 bp, Homo sapiens
acgtgccatatgcagcacgaggg

SEQ ID NO: 2852 - DNA, 23 bp, Homo sapiens
acgtgccatgtgcagcacgaggg

SEQ ID NO: 2853 - DNA, 23 bp, Homo sapiens
acgtgccatgttcagcacgaggg

SEQ ID NO: 2854 - DNA, 23 bp, Homo sapiens
acgtgggacaggaggaattaggg

SEQ ID NO: 2855 - DNA, 23 bp, Homo sapiens
acgtgggacaggaggaattatgg

SEQ ID NO: 2856 - DNA, 23 bp, Homo sapiens
actagaactttccaaagaatagg

SEQ ID NO: 2857 - DNA, 23 bp, Homo sapiens
actagaactttccaatgaatagg

SEQ ID NO: 2858 - DNA, 23 bp, Homo sapiens
actagaattttccacggaatagg

SEQ ID NO: 2859 - DNA, 23 bp, Homo sapiens
actagggctctctccggtcgagg

SEQ ID NO: 2860 - DNA, 23 bp, Homo sapiens
actcatgaatgctggaatcaagg

SEQ ID NO: 2861 - DNA, 23 bp, Homo sapiens
actccacgcacaggccctccagg

SEQ ID NO: 2862 - DNA, 23 bp, Homo sapiens
actccacgcaccggccctccagg

SEQ ID NO: 2863 - DNA, 23 bp, Homo sapiens
actccacgcacgtgccatccagg

SEQ ID NO: 2864 - DNA, 23 bp, Homo sapiens
actccacgcacgtgccctccagg

SEQ ID NO: 2865 - DNA, 23 bp, Homo sapiens
actccacgcactcgccctccagg

SEQ ID NO: 2866 - DNA, 23 bp, Homo sapiens
actccctccttttctatctgtgg

SEQ ID NO: 2867 - DNA, 23 bp, Homo sapiens
actcctcatattatgctaacagg

SEQ ID NO: 2868 - DNA, 23 bp, Homo sapiens
actcctccctgtcccctcacagg

SEQ ID NO: 2869 - DNA, 23 bp, Homo sapiens
actcctttctggtatctcacagg

SEQ ID NO: 2870 - DNA, 23 bp, Homo sapiens
actcgaaacgtcccaatcaaagg

SEQ ID NO: 2871 - DNA, 23 bp, Homo sapiens
actcgaactttccaatgaatagg

SEQ ID NO: 2872 - DNA, 23 bp, Homo sapiens
actctcaggctgcgtgtaagtgg

SEQ ID NO: 2873 - DNA, 23 bp, Homo sapiens
actctgagatgctgggccctggg

SEQ ID NO: 2874 - DNA, 23 bp, Homo sapiens
actgacctggcagcgggatgggg

SEQ ID NO: 2875 - DNA, 23 bp, Homo sapiens
actgacctggcagtgggatgggg

SEQ ID NO: 2876 - DNA, 23 bp, Homo sapiens
actgggctgaccgcggggccggg

SEQ ID NO: 2877 - DNA, 23 bp, Homo sapiens
actgggctgaccgcgggggcggg

SEQ ID NO: 2878 - DNA, 23 bp, Homo sapiens
actgggctgaccgcggggtcggg

SEQ ID NO: 2879 - DNA, 23 bp, Homo sapiens
actgggctgaccgtggggtcggg

SEQ ID NO: 2880 - DNA, 23 bp, Homo sapiens
actggggaggcgccgcgttgagg

SEQ ID NO: 2881 - DNA, 23 bp, Homo sapiens
actggggaggcgccgcgttgggg

SEQ ID NO: 2882 - DNA, 23 bp, Homo sapiens
actggggctctctccggccgagg

SEQ ID NO: 2883 - DNA, 23 bp, Homo sapiens
actggggctctctccggtcgagg

SEQ ID NO: 2884 - DNA, 23 bp, Homo sapiens
actgggtaggcccatgattgtgg

SEQ ID NO: 2885 - DNA, 23 bp, Homo sapiens
actggtcatacccgcggaggagg

SEQ ID NO: 2886 - DNA, 23 bp, Homo sapiens
actggtcatgcccgcggaggagg

SEQ ID NO: 2887 - DNA, 23 bp, Homo sapiens
actggttatacccgcggaggagg

SEQ ID NO: 2888 - DNA, 23 bp, Homo sapiens
actggttatgcccgcggaggagg

SEQ ID NO: 2889 - DNA, 23 bp, Homo sapiens
acttcaagtcacaaagggaaggg

SEQ ID NO: 2890 - DNA, 23 bp, Homo sapiens
acttcatatctgtcacagtgagg

SEQ ID NO: 2891 - DNA, 23 bp, Homo sapiens
acttcatggagtgggagcctggg

SEQ ID NO: 2892 - DNA, 23 bp, Homo sapiens
acttctgctcccgatctgagtgg

SEQ ID NO: 2893 - DNA, 23 bp, Homo sapiens
acttctgctcctgatctaagtgg

SEQ ID NO: 2894 - DNA, 23 bp, Homo sapiens
acttctgctcctgatctgagtgg

SEQ ID NO: 2895 - DNA, 23 bp, Homo sapiens
acttctggtcctgacctgagtgg

SEQ ID NO: 2896 - DNA, 23 bp, Homo sapiens
acttgtaaaggtgagattctggg

SEQ ID NO: 2897 - DNA, 23 bp, Homo sapiens
actttacctccactcagatcagg

SEQ ID NO: 2898 - DNA, 23 bp, Homo sapiens
actttacctccactcagatcggg

SEQ ID NO: 2899 - DNA, 23 bp, Homo sapiens
actttacctccacttagatcagg

SEQ ID NO: 2900 - DNA, 23 bp, Homo sapiens
agaaaagaaactgcggagttggg

SEQ ID NO: 2901 - DNA, 23 bp, Homo sapiens
agaaaggagccagggccttaagg

SEQ ID NO: 2902 - DNA, 23 bp, Homo sapiens
agaaaggagtcagggccttaagg

SEQ ID NO: 2903 - DNA, 23 bp, Homo sapiens
agaacctggccccgaccccacgg

SEQ ID NO: 2904 - DNA, 23 bp, Homo sapiens
agaacctggccccgaccccgcgg

SEQ ID NO: 2905 - DNA, 23 bp, Homo sapiens
agaacctggccccgcccccgtgg

SEQ ID NO: 2906 - DNA, 23 bp, Homo sapiens
agaacctggcccggaccccgagg

SEQ ID NO: 2907 - DNA, 23 bp, Homo sapiens
agaacctggcccggaccccgcgg

SEQ ID NO: 2908 - DNA, 23 bp, Homo sapiens
agaacgaggacctgcgctcctgg

SEQ ID NO: 2909 - DNA, 23 bp, Homo sapiens
agaactacgactgcagacccagg

SEQ ID NO: 2910 - DNA, 23 bp, Homo sapiens
agaactatgactgcagacccagg

SEQ ID NO: 2911 - DNA, 23 bp, Homo sapiens
agaagagctcaggtggagaaggg

SEQ ID NO: 2912 - DNA, 23 bp, Homo sapiens
agaagccaatcagcgtcgccggg

SEQ ID NO: 2913 - DNA, 23 bp, Homo sapiens
agaagccaatcagtgtcgccggg

SEQ ID NO: 2914 - DNA, 23 bp, Homo sapiens
agaaggacccgacacaagttggg

SEQ ID NO: 2915 - DNA, 23 bp, Homo sapiens
agaaggacccgacacaggttggg

SEQ ID NO: 2916 - DNA, 23 bp, Homo sapiens
agaaggacccgacataggttggg

SEQ ID NO: 2917 - DNA, 23 bp, Homo sapiens
agaaggacccgacgcaggttggg

SEQ ID NO: 2918 - DNA, 23 bp, Homo sapiens
agaaggacccgtcgcaggttggg

SEQ ID NO: 2919 - DNA, 23 bp, Homo sapiens
agaaggaccctacataggttggg

SEQ ID NO: 2920 - DNA, 23 bp, Homo sapiens
agaagtatgactacagacccagg

SEQ ID NO: 2921 - DNA, 23 bp, Homo sapiens
agaagtcccaggtcccgggcggg

SEQ ID NO: 2922 - DNA, 23 bp, Homo sapiens
agaagtgaaactcaggggagtgg

SEQ ID NO: 2923 - DNA, 23 bp, Homo sapiens
agaagtgaaactcgtgggagtgg

SEQ ID NO: 2924 - DNA, 23 bp, Homo sapiens
agacaccgagatgcgggtcacgg

SEQ ID NO: 2925 - DNA, 23 bp, Homo sapiens
agacactttgcatctctcttggg

SEQ ID NO: 2926 - DNA, 23 bp, Homo sapiens
agacagaaccttccagaagtggg

SEQ ID NO: 2927 - DNA, 23 bp, Homo sapiens
agacagctctgggaaaagagggg

SEQ ID NO: 2928 - DNA, 23 bp, Homo sapiens
agacagggcacatttctagctgg

SEQ ID NO: 2929 - DNA, 23 bp, Homo sapiens
agaccaggcctgcaggggatggg

SEQ ID NO: 2930 - DNA, 23 bp, Homo sapiens
agaccagggcgggtgagtgcggg

SEQ ID NO: 2931 - DNA, 23 bp, Homo sapiens
agacccagagagccccgcccggg

SEQ ID NO: 2932 - DNA, 23 bp, Homo sapiens
agacccctgatcagtattccagg

SEQ ID NO: 2933 - DNA, 23 bp, Homo sapiens
agaccctgagaaccccgcccggg

SEQ ID NO: 2934 - DNA, 23 bp, Homo sapiens
agaccctgagagccacgcctggg

SEQ ID NO: 2935 - DNA, 23 bp, Homo sapiens
agaccctgagagccccgcccggg

SEQ ID NO: 2936 - DNA, 23 bp, Homo sapiens
agaccctgagagccccgtccggg

SEQ ID NO: 2937 - DNA, 23 bp, Homo sapiens
agaccctggcccaggccccgcgg

SEQ ID NO: 2938 - DNA, 23 bp, Homo sapiens
agaccctggccccgcccccgcgg

SEQ ID NO: 2939 - DNA, 23 bp, Homo sapiens
agaccctggccccgcccccgtgg

SEQ ID NO: 2940 - DNA, 23 bp, Homo sapiens
agaccctggccccggccccgcgg

SEQ ID NO: 2941 - DNA, 23 bp, Homo sapiens
agacctacaggcgatcaggtagg

SEQ ID NO: 2942 - DNA, 23 bp, Homo sapiens
agacctggaccggtgagtgcggg

SEQ ID NO: 2943 - DNA, 23 bp, Homo sapiens
agacctgggcaggtgagtgcggg

SEQ ID NO: 2944 - DNA, 23 bp, Homo sapiens
agacctgggccggtgagtgcggg

SEQ ID NO: 2945 - DNA, 23 bp, Homo sapiens
agacctgggcctgtgagtgcggg

SEQ ID NO: 2946 - DNA, 23 bp, Homo sapiens
agacctgggcgggtgagtgcggg

SEQ ID NO: 2947 - DNA, 23 bp, Homo sapiens
agacctgggctggtgagtgcggg

SEQ ID NO: 2948 - DNA, 23 bp, Homo sapiens
agacgccaagatgctggtcatgg

SEQ ID NO: 2949 - DNA, 23 bp, Homo sapiens
agacgccgagatgcgggtcacgg

SEQ ID NO: 2950 - DNA, 23 bp, Homo sapiens
agacgccgagatgcgggtcatgg

SEQ ID NO: 2951 - DNA, 23 bp, Homo sapiens
agacgccgagatgctggtcatgg

SEQ ID NO: 2952 - DNA, 23 bp, Homo sapiens
agacggctctgggaaaagagggg

SEQ ID NO: 2953 - DNA, 23 bp, Homo sapiens
agacggctctgggaaaggaaggg

SEQ ID NO: 2954 - DNA, 23 bp, Homo sapiens
agacggctctgggaaaggagggg

SEQ ID NO: 2955 - DNA, 23 bp, Homo sapiens
agactaaccgagcgaacctgggg

SEQ ID NO: 2956 - DNA, 23 bp, Homo sapiens
agactcaccgagtggacctgggg

SEQ ID NO: 2957 - DNA, 23 bp, Homo sapiens
agactctgagagccacgcctggg

SEQ ID NO: 2958 - DNA, 23 bp, Homo sapiens
agactgaccgagagaacctgcgg

SEQ ID NO: 2959 - DNA, 23 bp, Homo sapiens
agactgaccgagagaacctgggg

SEQ ID NO: 2960 - DNA, 23 bp, Homo sapiens
agactgaccgagagagcctgcgg

SEQ ID NO: 2961 - DNA, 23 bp, Homo sapiens
agactgaccgagaggacctgcgg

SEQ ID NO: 2962 - DNA, 23 bp, Homo sapiens
agactgaccgagcgaacctgggg

SEQ ID NO: 2963 - DNA, 23 bp, Homo sapiens
agactgaccgagtgaacctgcgg

SEQ ID NO: 2964 - DNA, 23 bp, Homo sapiens
agactgaccgagtgagcctgcgg

SEQ ID NO: 2965 - DNA, 23 bp, Homo sapiens
agactgaccgagtggacctgggg

SEQ ID NO: 2966 - DNA, 23 bp, Homo sapiens
agacttaccgagagaacctgcgg

SEQ ID NO: 2967 - DNA, 23 bp, Homo sapiens
agacttaccgagagagcctgcgg

SEQ ID NO: 2968 - DNA, 23 bp, Homo sapiens
agacttaccgagaggacctgcgg

SEQ ID NO: 2969 - DNA, 23 bp, Homo sapiens
agagaaagcagaagtccttctgg

SEQ ID NO: 2970 - DNA, 23 bp, Homo sapiens
agagaacccagacgccagcctgg

SEQ ID NO: 2971 - DNA, 23 bp, Homo sapiens
agagaagagggggccctcagagg

SEQ ID NO: 2972 - DNA, 23 bp, Homo sapiens
agagagccccgcccgggacctgg

SEQ ID NO: 2973 - DNA, 23 bp, Homo sapiens
agagagcctacctggagggccgg

SEQ ID NO: 2974 - DNA, 23 bp, Homo sapiens
agagaggggaccgcaggcggggg

SEQ ID NO: 2975 - DNA, 23 bp, Homo sapiens
agagcagacggggccctcagagg

SEQ ID NO: 2976 - DNA, 23 bp, Homo sapiens
agagcagagggggccctcagagg

SEQ ID NO: 2977 - DNA, 23 bp, Homo sapiens
agagcagcaggaggacggttcgg

SEQ ID NO: 2978 - DNA, 23 bp, Homo sapiens
agagcagcaggaggagggctcgg

SEQ ID NO: 2979 - DNA, 23 bp, Homo sapiens
agagcagcaggaggagggcttgg

SEQ ID NO: 2980 - DNA, 23 bp, Homo sapiens
agagcagcaggaggagggttcgg

SEQ ID NO: 2981 - DNA, 23 bp, Homo sapiens
agagcagcaggatgagggttcgg

SEQ ID NO: 2982 - DNA, 23 bp, Homo sapiens
agagccacgcctggggccctggg

SEQ ID NO: 2983 - DNA, 23 bp, Homo sapiens
agagccccacttcatcgcagtgg

SEQ ID NO: 2984 - DNA, 23 bp, Homo sapiens
agagccccgcttcatcgcagtgg

SEQ ID NO: 2985 - DNA, 23 bp, Homo sapiens
agagccccgcttcatctcagtgg

SEQ ID NO: 2986 - DNA, 23 bp, Homo sapiens
agagcccctcaccctgagatggg

SEQ ID NO: 2987 - DNA, 23 bp, Homo sapiens
agagcccctcaccctgagctggg

SEQ ID NO: 2988 - DNA, 23 bp, Homo sapiens
agagccctgggcactgtcgctgg

SEQ ID NO: 2989 - DNA, 23 bp, Homo sapiens
agagccctgggcactgttgctgg

SEQ ID NO: 2990 - DNA, 23 bp, Homo sapiens
agagcgcaggtcctcgttcaagg

SEQ ID NO: 2991 - DNA, 23 bp, Homo sapiens
agagcgcaggtcctcgttcaggg

SEQ ID NO: 2992 - DNA, 23 bp, Homo sapiens
agagcgcaggtcctctttcaggg

SEQ ID NO: 2993 - DNA, 23 bp, Homo sapiens
agagctcaggtggggtgaagggg

SEQ ID NO: 2994 - DNA, 23 bp, Homo sapiens
agaggaacgaggtgcccgcccgg

SEQ ID NO: 2995 - DNA, 23 bp, Homo sapiens
agaggagcgaggggcccgcccgg

SEQ ID NO: 2996 - DNA, 23 bp, Homo sapiens
agaggagcgaggggccctcccgg

SEQ ID NO: 2997 - DNA, 23 bp, Homo sapiens
agaggccgagatgcgggtcatgg

SEQ ID NO: 2998 - DNA, 23 bp, Homo sapiens
agaggctcttgaagtcacaaagg

SEQ ID NO: 2999 - DNA, 23 bp, Homo sapiens
agagggagcacaggtcagcgtgg

SEQ ID NO: 3000 - DNA, 23 bp, Homo sapiens
agagggtcatggtggacatcggg

SEQ ID NO: 3001 - DNA, 23 bp, Homo sapiens
agagggtcatggtggacatgggg

SEQ ID NO: 3002 - DNA, 23 bp, Homo sapiens
agaggtcgtgacctgcgccccgg

SEQ ID NO: 3003 - DNA, 23 bp, Homo sapiens
agagtaagtgctagcacacaggg

SEQ ID NO: 3004 - DNA, 23 bp, Homo sapiens
agagtaagtgctggcacacaggg

SEQ ID NO: 3005 - DNA, 23 bp, Homo sapiens
agagtaagttctggcacacaggg

SEQ ID NO: 3006 - DNA, 23 bp, Homo sapiens
agagtagcaggacgagggttcgg

SEQ ID NO: 3007 - DNA, 23 bp, Homo sapiens
agagtagcaggaggagggttcgg

SEQ ID NO: 3008 - DNA, 23 bp, Homo sapiens
agagtctcaggccccgaaggcgg

SEQ ID NO: 3009 - DNA, 23 bp, Homo sapiens
agagtgggcgggggggggtgggg

SEQ ID NO: 3010 - DNA, 23 bp, Homo sapiens
agagtgggcggggggggtggtgg

SEQ ID NO: 3011 - DNA, 23 bp, Homo sapiens
agatagaaccttccagaagtggg

SEQ ID NO: 3012 - DNA, 23 bp, Homo sapiens
agatcacactgacctggcagcgg

SEQ ID NO: 3013 - DNA, 23 bp, Homo sapiens
agatcacactgacctggcagtgg

SEQ ID NO: 3014 - DNA, 23 bp, Homo sapiens
agatccgcccccgaggccgcggg

SEQ ID NO: 3015 - DNA, 23 bp, Homo sapiens
agatctacaggagatagggaagg

SEQ ID NO: 3016 - DNA, 23 bp, Homo sapiens
agatctacaggagatggggaagg

SEQ ID NO: 3017 - DNA, 23 bp, Homo sapiens
agatctacaggcgatcaggaagg

SEQ ID NO: 3018 - DNA, 23 bp, Homo sapiens
agatctacaggcgatcagggagg

SEQ ID NO: 3019 - DNA, 23 bp, Homo sapiens
agatctacgggagatggggaagg

SEQ ID NO: 3020 - DNA, 23 bp, Homo sapiens
agatctataggagatggggaagg

SEQ ID NO: 3021 - DNA, 23 bp, Homo sapiens
agatctataggcgatcagggagg

SEQ ID NO: 3022 - DNA, 23 bp, Homo sapiens
agatgaagcggggctccccgcgg

SEQ ID NO: 3023 - DNA, 23 bp, Homo sapiens
agatgaagcggggctctccgcgg

SEQ ID NO: 3024 - DNA, 23 bp, Homo sapiens
agatggaaccttccagaagtggg

SEQ ID NO: 3025 - DNA, 23 bp, Homo sapiens
agatggagccgcgggcgccgtgg

SEQ ID NO: 3026 - DNA, 23 bp, Homo sapiens
agatggccctgggaaaggagggg

SEQ ID NO: 3027 - DNA, 23 bp, Homo sapiens
agatggctctgggaaaagagggg

SEQ ID NO: 3028 - DNA, 23 bp, Homo sapiens
agatggctctgggaaaggagggg

SEQ ID NO: 3029 - DNA, 23 bp, Homo sapiens
agatggggtaaggagggagacgg

SEQ ID NO: 3030 - DNA, 23 bp, Homo sapiens
agatggggtaaggagggagatgg

SEQ ID NO: 3031 - DNA, 23 bp, Homo sapiens
agattacatcgccctgaacgagg

SEQ ID NO: 3032 - DNA, 23 bp, Homo sapiens
agattcttggggtctagagtggg

SEQ ID NO: 3033 - DNA, 23 bp, Homo sapiens
agattgaccgagtggacctgggg

SEQ ID NO: 3034 - DNA, 23 bp, Homo sapiens
agcaacgggcccgcctggcgggg

SEQ ID NO: 3035 - DNA, 23 bp, Homo sapiens
agcaagaggggccggagtattgg

SEQ ID NO: 3036 - DNA, 23 bp, Homo sapiens
agcaaggggaccgcaggcggggg

SEQ ID NO: 3037 - DNA, 23 bp, Homo sapiens
agcaaggggcccgcccggcgggg

SEQ ID NO: 3038 - DNA, 23 bp, Homo sapiens
agcaaggggcccgcctggcgggg

SEQ ID NO: 3039 - DNA, 23 bp, Homo sapiens
agcaaggggccctcctggcgggg

SEQ ID NO: 3040 - DNA, 23 bp, Homo sapiens
agcacacagggtcccaggctggg

SEQ ID NO: 3041 - DNA, 23 bp, Homo sapiens
agcacctcagagtggcctcatgg

SEQ ID NO: 3042 - DNA, 23 bp, Homo sapiens
agcacctcagggtgacctcatgg

SEQ ID NO: 3043 - DNA, 23 bp, Homo sapiens
agcacctcagggtggcctcatgg

SEQ ID NO: 3044 - DNA, 23 bp, Homo sapiens
agcacctcagggtggcttcatgg

SEQ ID NO: 3045 - DNA, 23 bp, Homo sapiens
agcagagaacaaggcctgagagg

SEQ ID NO: 3046 - DNA, 23 bp, Homo sapiens
agcagcaggaggacggttcgggg

SEQ ID NO: 3047 - DNA, 23 bp, Homo sapiens
agcagcaggaggagggctcgggg

SEQ ID NO: 3048 - DNA, 23 bp, Homo sapiens
agcagcaggaggagggcttgggg

SEQ ID NO: 3049 - DNA, 23 bp, Homo sapiens
agcagcaggaggagggttcgggg

SEQ ID NO: 3050 - DNA, 23 bp, Homo sapiens
agcagcaggatgagggttcgggg

SEQ ID NO: 3051 - DNA, 23 bp, Homo sapiens
agcaggagaggcctgagtattgg

SEQ ID NO: 3052 - DNA, 23 bp, Homo sapiens
agcaggaggagccggagtattgg

SEQ ID NO: 3053 - DNA, 23 bp, Homo sapiens
agcaggaggagggttcggggcgg

SEQ ID NO: 3054 - DNA, 23 bp, Homo sapiens
agcaggaggggccggaatattgg

SEQ ID NO: 3055 - DNA, 23 bp, Homo sapiens
agcaggaggggccggagtattgg

SEQ ID NO: 3056 - DNA, 23 bp, Homo sapiens
agcaggagggtccggagtattgg

SEQ ID NO: 3057 - DNA, 23 bp, Homo sapiens
agcatctcagagtggcctcatgg

SEQ ID NO: 3058 - DNA, 23 bp, Homo sapiens
agcatgcgatgggctgtttaagg

SEQ ID NO: 3059 - DNA, 23 bp, Homo sapiens
agcatgtacggctgcgacgtggg

SEQ ID NO: 3060 - DNA, 23 bp, Homo sapiens
agcattcatgagtcaggggaagg

SEQ ID NO: 3061 - DNA, 23 bp, Homo sapiens
agcattcgtgagtcaggggaagg

SEQ ID NO: 3062 - DNA, 23 bp, Homo sapiens
agccattttgcatctgtcatggg

SEQ ID NO: 3063 - DNA, 23 bp, Homo sapiens
agcccagggcccagcacctcagg

SEQ ID NO: 3064 - DNA, 23 bp, Homo sapiens
agccctcctcctgctgctctcgg

SEQ ID NO: 3065 - DNA, 23 bp, Homo sapiens
agccgcgcagggaggagggtcgg

SEQ ID NO: 3066 - DNA, 23 bp, Homo sapiens
agccgcgcagggaggtgggtcgg

SEQ ID NO: 3067 - DNA, 23 bp, Homo sapiens
agccgcgccgggacgagggtcgg

SEQ ID NO: 3068 - DNA, 23 bp, Homo sapiens
agccgcgccgggaggagggtcgg

SEQ ID NO: 3069 - DNA, 23 bp, Homo sapiens
agccgcgcctggaggagggtcgg

SEQ ID NO: 3070 - DNA, 23 bp, Homo sapiens
agccgtgggtggagcaggagggg

SEQ ID NO: 3071 - DNA, 23 bp, Homo sapiens
agcctctctgacctttagcaggg

SEQ ID NO: 3072 - DNA, 23 bp, Homo sapiens
agcgacgccgcgagtccaagagg

SEQ ID NO: 3073 - DNA, 23 bp, Homo sapiens
agcgacgccgcgagtccgagagg

SEQ ID NO: 3074 - DNA, 23 bp, Homo sapiens
agcgaggggaccgcaggcggggg

SEQ ID NO: 3075 - DNA, 23 bp, Homo sapiens
agcgaggggcccgcccggcgagg

SEQ ID NO: 3076 - DNA, 23 bp, Homo sapiens
agcgaggggccctcccggcgagg

SEQ ID NO: 3077 - DNA, 23 bp, Homo sapiens
agcgcccgtccgaccccacgtgg

SEQ ID NO: 3078 - DNA, 23 bp, Homo sapiens
agcggtgtagaaatacctcatgg

SEQ ID NO: 3079 - DNA, 23 bp, Homo sapiens
agctatgttcgctggagctgtgg

SEQ ID NO: 3080 - DNA, 23 bp, Homo sapiens
agctcagggcccagcacctcagg

SEQ ID NO: 3081 - DNA, 23 bp, Homo sapiens
agctctgggaaaagaggggaagg

SEQ ID NO: 3082 - DNA, 23 bp, Homo sapiens
agctgaagtggtcgggggtgggg

SEQ ID NO: 3083 - DNA, 23 bp, Homo sapiens
agctgaagtggtctggggtgggg

SEQ ID NO: 3084 - DNA, 23 bp, Homo sapiens
agctgccgcagtggtcaaagtgg

SEQ ID NO: 3085 - DNA, 23 bp, Homo sapiens
agctgctgcagtggtcaaagtgg

SEQ ID NO: 3086 - DNA, 23 bp, Homo sapiens
agctggagcgcgctggtaccagg

SEQ ID NO: 3087 - DNA, 23 bp, Homo sapiens
agctggggtaaggaggggaatgg

SEQ ID NO: 3088 - DNA, 23 bp, Homo sapiens
agctgtcctaggagctatggtgg

SEQ ID NO: 3089 - DNA, 23 bp, Homo sapiens
agctgtcctaggagctgtgatgg

SEQ ID NO: 3090 - DNA, 23 bp, Homo sapiens
agctgtcctaggagctgtggtgg

SEQ ID NO: 3091 - DNA, 23 bp, Homo sapiens
agctgtgatcactggagctgtgg

SEQ ID NO: 3092 - DNA, 23 bp, Homo sapiens
agctgtgatcgctggagctgtgg

SEQ ID NO: 3093 - DNA, 23 bp, Homo sapiens
agctgtgttcgctggagctgtgg

SEQ ID NO: 3094 - DNA, 23 bp, Homo sapiens
agcttgtaaaggtgagagcctgg

SEQ ID NO: 3095 - DNA, 23 bp, Homo sapiens
agcttgtaaaggtgagagcttgg

SEQ ID NO: 3096 - DNA, 23 bp, Homo sapiens
aggaaaagtcacggttcccaagg

SEQ ID NO: 3097 - DNA, 23 bp, Homo sapiens
aggaaaagtcatggttcccaagg

SEQ ID NO: 3098 - DNA, 23 bp, Homo sapiens
aggaaagcaagtgtgggtcctgg

SEQ ID NO: 3099 - DNA, 23 bp, Homo sapiens
aggaacagctcaggtggagaagg

SEQ ID NO: 3100 - DNA, 23 bp, Homo sapiens
aggaagagctcaggtagggaagg

SEQ ID NO: 3101 - DNA, 23 bp, Homo sapiens
aggaagagctcaggtggagaagg

SEQ ID NO: 3102 - DNA, 23 bp, Homo sapiens
aggaagagctcaggtggggaagg

SEQ ID NO: 3103 - DNA, 23 bp, Homo sapiens
aggaagagttcaggtagggaagg

SEQ ID NO: 3104 - DNA, 23 bp, Homo sapiens
aggacacctgggatggggaaggg

SEQ ID NO: 3105 - DNA, 23 bp, Homo sapiens
aggacacctggggtagggaaggg

SEQ ID NO: 3106 - DNA, 23 bp, Homo sapiens
aggacacctggggtggggaaggg

SEQ ID NO: 3107 - DNA, 23 bp, Homo sapiens
aggacacctggtgtggggaaggg

SEQ ID NO: 3108 - DNA, 23 bp, Homo sapiens
aggacccgggaagccgcgccggg

SEQ ID NO: 3109 - DNA, 23 bp, Homo sapiens
aggacccgggaagccgcgcctgg

SEQ ID NO: 3110 - DNA, 23 bp, Homo sapiens
aggacccggggagccgcgcaggg

SEQ ID NO: 3111 - DNA, 23 bp, Homo sapiens
aggacccggggagccgcgccggg

SEQ ID NO: 3112 - DNA, 23 bp, Homo sapiens
aggacccggggagcggcgcaggg

SEQ ID NO: 3113 - DNA, 23 bp, Homo sapiens
aggacccgggtagccgcgccggg

SEQ ID NO: 3114 - DNA, 23 bp, Homo sapiens
aggaccgggggagccgcgccggg

SEQ ID NO: 3115 - DNA, 23 bp, Homo sapiens
aggacctgaggagccgcgccggg

SEQ ID NO: 3116 - DNA, 23 bp, Homo sapiens
aggacctggtcagagcccacagg

SEQ ID NO: 3117 - DNA, 23 bp, Homo sapiens
aggacctggtcagagcccgcagg

SEQ ID NO: 3118 - DNA, 23 bp, Homo sapiens
aggacctggtcagagccctcagg

SEQ ID NO: 3119 - DNA, 23 bp, Homo sapiens
aggaccttcaggagggcggttgg

SEQ ID NO: 3120 - DNA, 23 bp, Homo sapiens
aggacgaagtcccaggccccggg

SEQ ID NO: 3121 - DNA, 23 bp, Homo sapiens
aggacgaagtcccaggtcccggg

SEQ ID NO: 3122 - DNA, 23 bp, Homo sapiens
aggagactctgagtccgggtggg

SEQ ID NO: 3123 - DNA, 23 bp, Homo sapiens
aggagagaggggaccgcaggcgg

SEQ ID NO: 3124 - DNA, 23 bp, Homo sapiens
aggagattctgagtccgggtggg

SEQ ID NO: 3125 - DNA, 23 bp, Homo sapiens
aggagattttgagtccgggtggg

SEQ ID NO: 3126 - DNA, 23 bp, Homo sapiens
aggagcaaggggaccgcaggcgg

SEQ ID NO: 3127 - DNA, 23 bp, Homo sapiens
aggagccctgcaccctgagatgg

SEQ ID NO: 3128 - DNA, 23 bp, Homo sapiens
aggagcccttcagcagggtcagg

SEQ ID NO: 3129 - DNA, 23 bp, Homo sapiens
aggagcgaggggaccgcaggcgg

SEQ ID NO: 3130 - DNA, 23 bp, Homo sapiens
aggagcgcagatcctcgttcagg

SEQ ID NO: 3131 - DNA, 23 bp, Homo sapiens
aggagcgcaggtcctcattcagg

SEQ ID NO: 3132 - DNA, 23 bp, Homo sapiens
aggagcgcaggtcctcgttcagg

SEQ ID NO: 3133 - DNA, 23 bp, Homo sapiens
aggagcgcaggtcctcgttctgg

SEQ ID NO: 3134 - DNA, 23 bp, Homo sapiens
aggagctcaggtcctcgttcagg

SEQ ID NO: 3135 - DNA, 23 bp, Homo sapiens
aggaggaattgtgaggtgggtgg

SEQ ID NO: 3136 - DNA, 23 bp, Homo sapiens
aggatgatccaagaaatcactgg

SEQ ID NO: 3137 - DNA, 23 bp, Homo sapiens
aggatgtacggctgcgacctggg

SEQ ID NO: 3138 - DNA, 23 bp, Homo sapiens
aggatgtacggctgcgacgtggg

SEQ ID NO: 3139 - DNA, 23 bp, Homo sapiens
aggatgtatggctgcgacctggg

SEQ ID NO: 3140 - DNA, 23 bp, Homo sapiens
aggatgtatggctgcgacgtggg

SEQ ID NO: 3141 - DNA, 23 bp, Homo sapiens
aggatgtctggctgcgacctggg

SEQ ID NO: 3142 - DNA, 23 bp, Homo sapiens
aggatgtctggctgcgacgtggg

SEQ ID NO: 3143 - DNA, 23 bp, Homo sapiens
aggatgtgtggctgcgacgtggg

SEQ ID NO: 3144 - DNA, 23 bp, Homo sapiens
aggatgtttggctgcgacctggg

SEQ ID NO: 3145 - DNA, 23 bp, Homo sapiens
aggatgtttggctgcgacgtggg

SEQ ID NO: 3146 - DNA, 23 bp, Homo sapiens
aggcaggatcaggaaacacgagg

SEQ ID NO: 3147 - DNA, 23 bp, Homo sapiens
aggcagggaacacttctacctgg

SEQ ID NO: 3148 - DNA, 23 bp, Homo sapiens
aggcagggcacacttctacctgg

SEQ ID NO: 3149 - DNA, 23 bp, Homo sapiens
aggcagggccatgcaatcttagg

SEQ ID NO: 3150 - DNA, 23 bp, Homo sapiens
aggcagggccatgcgatcttagg

SEQ ID NO: 3151 - DNA, 23 bp, Homo sapiens
aggcagggccatgtgatcttagg

SEQ ID NO: 3152 - DNA, 23 bp, Homo sapiens
aggcataatgtgaggaggtgggg

SEQ ID NO: 3153 - DNA, 23 bp, Homo sapiens
aggcattttgcatctgtaatggg

SEQ ID NO: 3154 - DNA, 23 bp, Homo sapiens
aggcattttgcatctgtcatggg

SEQ ID NO: 3155 - DNA, 23 bp, Homo sapiens
aggccaaaaatccccccgggtgg

SEQ ID NO: 3156 - DNA, 23 bp, Homo sapiens
aggccaaaatccccgcgggttgg

SEQ ID NO: 3157 - DNA, 23 bp, Homo sapiens
aggccatcccgggagatctacgg

SEQ ID NO: 3158 - DNA, 23 bp, Homo sapiens
aggccatgccgggagatctacgg

SEQ ID NO: 3159 - DNA, 23 bp, Homo sapiens
aggccccgggcggggctctcagg

SEQ ID NO: 3160 - DNA, 23 bp, Homo sapiens
aggcctgagaagaaaagtcatgg

SEQ ID NO: 3161 - DNA, 23 bp, Homo sapiens
aggcctgagaggaaaagtcacgg

SEQ ID NO: 3162 - DNA, 23 bp, Homo sapiens
aggcctgagaggaaaagtcatgg

SEQ ID NO: 3163 - DNA, 23 bp, Homo sapiens
aggcgaactggtcatacccgcgg

SEQ ID NO: 3164 - DNA, 23 bp, Homo sapiens
aggcgaactggtcatgcccgcgg

SEQ ID NO: 3165 - DNA, 23 bp, Homo sapiens
aggcgaactggttatacccgcgg

SEQ ID NO: 3166 - DNA, 23 bp, Homo sapiens
aggcgaactggttatgcccgcgg

SEQ ID NO: 3167 - DNA, 23 bp, Homo sapiens
aggcgacccgggccgtccgtggg

SEQ ID NO: 3168 - DNA, 23 bp, Homo sapiens
aggcgcctgggcctctcccgggg

SEQ ID NO: 3169 - DNA, 23 bp, Homo sapiens
aggcgctttgcatctctcatagg

SEQ ID NO: 3170 - DNA, 23 bp, Homo sapiens
aggcgctttgcatctctcatggg

SEQ ID NO: 3171 - DNA, 23 bp, Homo sapiens
aggcgctttgcatctttcatggg

SEQ ID NO: 3172 - DNA, 23 bp, Homo sapiens
aggcggactggtcatacccgcgg

SEQ ID NO: 3173 - DNA, 23 bp, Homo sapiens
aggcggactggtcatgcccgcgg

SEQ ID NO: 3174 - DNA, 23 bp, Homo sapiens
aggcggggcacacttctacctgg

SEQ ID NO: 3175 - DNA, 23 bp, Homo sapiens
aggcgggggcgcaggacccgggg

SEQ ID NO: 3176 - DNA, 23 bp, Homo sapiens
aggcgggggcgcaggacctgagg

SEQ ID NO: 3177 - DNA, 23 bp, Homo sapiens
aggcgggggctcaggacccgggg

SEQ ID NO: 3178 - DNA, 23 bp, Homo sapiens
aggcgtactggtcatacccgcgg

SEQ ID NO: 3179 - DNA, 23 bp, Homo sapiens
aggcgtactggtcatgcccgcgg

SEQ ID NO: 3180 - DNA, 23 bp, Homo sapiens
aggcgtactggtggtacccgcgg

SEQ ID NO: 3181 - DNA, 23 bp, Homo sapiens
aggcgtcctgccggtacccgcgg

SEQ ID NO: 3182 - DNA, 23 bp, Homo sapiens
aggcgtcctgctggtacccgcgg

SEQ ID NO: 3183 - DNA, 23 bp, Homo sapiens
aggcgtcctggtcatacccgcgg

SEQ ID NO: 3184 - DNA, 23 bp, Homo sapiens
aggcgtcctggtggtacccgcgg

SEQ ID NO: 3185 - DNA, 23 bp, Homo sapiens
aggcgtgctgttcatacccgcgg

SEQ ID NO: 3186 - DNA, 23 bp, Homo sapiens
aggctaactggtcatgcccgcgg

SEQ ID NO: 3187 - DNA, 23 bp, Homo sapiens
aggctaactggttatacccgcgg

SEQ ID NO: 3188 - DNA, 23 bp, Homo sapiens
aggctaactggttatgcccgcgg

SEQ ID NO: 3189 - DNA, 23 bp, Homo sapiens
aggctcttgaagtcacaaagggg

SEQ ID NO: 3190 - DNA, 23 bp, Homo sapiens
aggctgaccgagtgaacctgcgg

SEQ ID NO: 3191 - DNA, 23 bp, Homo sapiens
aggctgaccgagtgagcctgcgg

SEQ ID NO: 3192 - DNA, 23 bp, Homo sapiens
aggctgatgcctgaggtccttgg

SEQ ID NO: 3193 - DNA, 23 bp, Homo sapiens
aggctgcattagcccctgtgtgg

SEQ ID NO: 3194 - DNA, 23 bp, Homo sapiens
aggctgcgtgtaagtgatggcgg

SEQ ID NO: 3195 - DNA, 23 bp, Homo sapiens
aggctgcgtgtaagtgatggggg

SEQ ID NO: 3196 - DNA, 23 bp, Homo sapiens
aggctgcgtgtaagtggtggggg

SEQ ID NO: 3197 - DNA, 23 bp, Homo sapiens
aggctgcgttagcccctgtgagg

SEQ ID NO: 3198 - DNA, 23 bp, Homo sapiens
aggctgcgttagcccctgtgtgg

SEQ ID NO: 3199 - DNA, 23 bp, Homo sapiens
aggctgctgacctttctctcagg

SEQ ID NO: 3200 - DNA, 23 bp, Homo sapiens
aggctgctgcaggggtcaaaggg

SEQ ID NO: 3201 - DNA, 23 bp, Homo sapiens
aggctgctgccggtgtcaaaggg

SEQ ID NO: 3202 - DNA, 23 bp, Homo sapiens
aggctgggatggcccacgtgtgg

SEQ ID NO: 3203 - DNA, 23 bp, Homo sapiens
aggctgggatggcccaggtgtgg

SEQ ID NO: 3204 - DNA, 23 bp, Homo sapiens
aggctgggatggcccatgtgtgg

SEQ ID NO: 3205 - DNA, 23 bp, Homo sapiens
aggctgtgttagcccctgtgtgg

SEQ ID NO: 3206 - DNA, 23 bp, Homo sapiens
agggaaaaggcctaggtaatggg

SEQ ID NO: 3207 - DNA, 23 bp, Homo sapiens
agggaaaaggcctgggtaatggg

SEQ ID NO: 3208 - DNA, 23 bp, Homo sapiens
agggaaagcagaagtccttctgg

SEQ ID NO: 3209 - DNA, 23 bp, Homo sapiens
agggaaagcaggagcccttctgg

SEQ ID NO: 3210 - DNA, 23 bp, Homo sapiens
agggaaagcaggagcctctctgg

SEQ ID NO: 3211 - DNA, 23 bp, Homo sapiens
agggaatagaagattatcccagg

SEQ ID NO: 3212 - DNA, 23 bp, Homo sapiens
agggaggcggatctcggacccgg

SEQ ID NO: 3213 - DNA, 23 bp, Homo sapiens
agggcaggatcaggaaacacagg

SEQ ID NO: 3214 - DNA, 23 bp, Homo sapiens
agggcaggatcaggaaacacggg

SEQ ID NO: 3215 - DNA, 23 bp, Homo sapiens
agggcaggatcaggaaacatggg

SEQ ID NO: 3216 - DNA, 23 bp, Homo sapiens
agggcgcaggacccggggagcgg

SEQ ID NO: 3217 - DNA, 23 bp, Homo sapiens
agggcggggcggggctcgggggg

SEQ ID NO: 3218 - DNA, 23 bp, Homo sapiens
agggctgaggcttggaggtcagg

SEQ ID NO: 3219 - DNA, 23 bp, Homo sapiens
agggctgaggcttgggggtcagg

SEQ ID NO: 3220 - DNA, 23 bp, Homo sapiens
agggctgaggcttgggtgtaagg

SEQ ID NO: 3221 - DNA, 23 bp, Homo sapiens
aggggaaaggcctgggtaatggg

SEQ ID NO: 3222 - DNA, 23 bp, Homo sapiens
aggggagccccgggcgccgtggg

SEQ ID NO: 3223 - DNA, 23 bp, Homo sapiens
aggggagccgcgggagccgtggg

SEQ ID NO: 3224 - DNA, 23 bp, Homo sapiens
aggggagccgcgggcgccgtggg

SEQ ID NO: 3225 - DNA, 23 bp, Homo sapiens
aggggccctgaccctgctaaagg

SEQ ID NO: 3226 - DNA, 23 bp, Homo sapiens
aggggccctgaccctgctgaagg

SEQ ID NO: 3227 - DNA, 23 bp, Homo sapiens
aggggccggaatattgggaccgg

SEQ ID NO: 3228 - DNA, 23 bp, Homo sapiens
aggggccggagtattgggaccgg

SEQ ID NO: 3229 - DNA, 23 bp, Homo sapiens
aggggccggagtattgggacggg

SEQ ID NO: 3230 - DNA, 23 bp, Homo sapiens
aggggggcggatctcggacccgg

SEQ ID NO: 3231 - DNA, 23 bp, Homo sapiens
aggggggtggatctcggacccgg

SEQ ID NO: 3232 - DNA, 23 bp, Homo sapiens
agggggtcggatctcggacccgg

SEQ ID NO: 3233 - DNA, 23 bp, Homo sapiens
aggggtcacagtggacacaaggg

SEQ ID NO: 3234 - DNA, 23 bp, Homo sapiens
aggggtcacagtggacacggggg

SEQ ID NO: 3235 - DNA, 23 bp, Homo sapiens
aggggtcacggtggacacggggg

SEQ ID NO: 3236 - DNA, 23 bp, Homo sapiens
aggggtcagggcgaagtaccagg

SEQ ID NO: 3237 - DNA, 23 bp, Homo sapiens
aggggtcagggcgaagtcccagg

SEQ ID NO: 3238 - DNA, 23 bp, Homo sapiens
aggggtcatatctcttctcaggg

SEQ ID NO: 3239 - DNA, 23 bp, Homo sapiens
aggggtcatatctgttctcaggg

SEQ ID NO: 3240 - DNA, 23 bp, Homo sapiens
aggggtcatgtgtcttctcaggg

SEQ ID NO: 3241 - DNA, 23 bp, Homo sapiens
aggggtcctgaccctgctgaagg

SEQ ID NO: 3242 - DNA, 23 bp, Homo sapiens
aggggtcgggacctgcgccccgg

SEQ ID NO: 3243 - DNA, 23 bp, Homo sapiens
aggggtcgtgacctgcgccccgg

SEQ ID NO: 3244 - DNA, 23 bp, Homo sapiens
aggggtgaagagcggggtctggg

SEQ ID NO: 3245 - DNA, 23 bp, Homo sapiens
aggggtgaggagtggggtctggg

SEQ ID NO: 3246 - DNA, 23 bp, Homo sapiens
aggggtgaggggtggggtctggg

SEQ ID NO: 3247 - DNA, 23 bp, Homo sapiens
aggggtgatgtgtcttctcaggg

SEQ ID NO: 3248 - DNA, 23 bp, Homo sapiens
agggtacttcaagtcacaaaggg

SEQ ID NO: 3249 - DNA, 23 bp, Homo sapiens
agggtccggagtattgggacggg

SEQ ID NO: 3250 - DNA, 23 bp, Homo sapiens
agggtctcaggccccgaaggcgg

SEQ ID NO: 3251 - DNA, 23 bp, Homo sapiens
agggtgtgagaccctggcccagg

SEQ ID NO: 3252 - DNA, 23 bp, Homo sapiens
agggtgtgagaccctggccccgg

SEQ ID NO: 3253 - DNA, 23 bp, Homo sapiens
agggttcttcaagtcacaaaggg

SEQ ID NO: 3254 - DNA, 23 bp, Homo sapiens
aggtcagggctgaggcttggggg

SEQ ID NO: 3255 - DNA, 23 bp, Homo sapiens
aggtcagtgtgatctccacaggg

SEQ ID NO: 3256 - DNA, 23 bp, Homo sapiens
aggtcagtgtgatctccccaggg

SEQ ID NO: 3257 - DNA, 23 bp, Homo sapiens
aggtcagtgtgatctccgcaggg

SEQ ID NO: 3258 - DNA, 23 bp, Homo sapiens
aggtcagtgtgatctccgtaggg

SEQ ID NO: 3259 - DNA, 23 bp, Homo sapiens
aggtcagtgtgatctctgcaggg

SEQ ID NO: 3260 - DNA, 23 bp, Homo sapiens
aggtcccggacggggctctcagg

SEQ ID NO: 3261 - DNA, 23 bp, Homo sapiens
aggtcccgggcggggctctcagg

SEQ ID NO: 3262 - DNA, 23 bp, Homo sapiens
aggtcccgggcggggctctctgg

SEQ ID NO: 3263 - DNA, 23 bp, Homo sapiens
aggtcccgggcggggttctcagg

SEQ ID NO: 3264 - DNA, 23 bp, Homo sapiens
aggtcctgcgcccccgcctgcgg

SEQ ID NO: 3265 - DNA, 23 bp, Homo sapiens
aggtgagtgcggggtcgggaggg

SEQ ID NO: 3266 - DNA, 23 bp, Homo sapiens
aggtggaggaggaagagctcagg

SEQ ID NO: 3267 - DNA, 23 bp, Homo sapiens
aggtggggcacacttctacctgg

SEQ ID NO: 3268 - DNA, 23 bp, Homo sapiens
aggtggggtgaagggatgaaggg

SEQ ID NO: 3269 - DNA, 23 bp, Homo sapiens
aggtggggtgaaggggtgaaggg

SEQ ID NO: 3270 - DNA, 23 bp, Homo sapiens
aggtgggtgggctcccccatggg

SEQ ID NO: 3271 - DNA, 23 bp, Homo sapiens
aggttgcgtgtaagtgatggcgg

SEQ ID NO: 3272 - DNA, 23 bp, Homo sapiens
aggttggtcggggcggggcgggg

SEQ ID NO: 3273 - DNA, 23 bp, Homo sapiens
agtagaacaaaaacaggacctgg

SEQ ID NO: 3274 - DNA, 23 bp, Homo sapiens
agtagaaccaaaacaggacctgg

SEQ ID NO: 3275 - DNA, 23 bp, Homo sapiens
agtagcaggacgagggttcgggg

SEQ ID NO: 3276 - DNA, 23 bp, Homo sapiens
agtagcaggaggagggttcgggg

SEQ ID NO: 3277 - DNA, 23 bp, Homo sapiens
agtagccgcgcagggtccccagg

SEQ ID NO: 3278 - DNA, 23 bp, Homo sapiens
agtagccgcgcagggtccgcagg

SEQ ID NO: 3279 - DNA, 23 bp, Homo sapiens
agtagccgcgcaggttccgcagg

SEQ ID NO: 3280 - DNA, 23 bp, Homo sapiens
agtagccgcgcagtttccgcagg

SEQ ID NO: 3281 - DNA, 23 bp, Homo sapiens
agtagcggagcagggtccgcagg

SEQ ID NO: 3282 - DNA, 23 bp, Homo sapiens
agtagcggagcgcgatccgcagg

SEQ ID NO: 3283 - DNA, 23 bp, Homo sapiens
agtagcggagcgcggtgcgcagg

SEQ ID NO: 3284 - DNA, 23 bp, Homo sapiens
agtagctgcgcaggttccgcagg

SEQ ID NO: 3285 - DNA, 23 bp, Homo sapiens
agtattgggaccaggagacacgg

SEQ ID NO: 3286 - DNA, 23 bp, Homo sapiens
agtattgggaccggaacacacgg

SEQ ID NO: 3287 - DNA, 23 bp, Homo sapiens
agtattgggaccgggagacacgg

SEQ ID NO: 3288 - DNA, 23 bp, Homo sapiens
agtattgggacctgcagacacgg

SEQ ID NO: 3289 - DNA, 23 bp, Homo sapiens
agtattgggacgaggagacacgg

SEQ ID NO: 3290 - DNA, 23 bp, Homo sapiens
agtattgggacgaggagacaggg

SEQ ID NO: 3291 - DNA, 23 bp, Homo sapiens
agtattgggacggggagacacgg

SEQ ID NO: 3292 - DNA, 23 bp, Homo sapiens
agtcagggccatgcgatcttagg

SEQ ID NO: 3293 - DNA, 23 bp, Homo sapiens
agtccctagaatactgatcaggg

SEQ ID NO: 3294 - DNA, 23 bp, Homo sapiens
agtccctaggatagtgatcaggg

SEQ ID NO: 3295 - DNA, 23 bp, Homo sapiens
agtccctggaatactgatcaggg

SEQ ID NO: 3296 - DNA, 23 bp, Homo sapiens
agtcctggagcccttcagccagg

SEQ ID NO: 3297 - DNA, 23 bp, Homo sapiens
agtcctggagcccttcagccggg

SEQ ID NO: 3298 - DNA, 23 bp, Homo sapiens
agtcctggagcccttcagctggg

SEQ ID NO: 3299 - DNA, 23 bp, Homo sapiens
agtgcgggtcggcagggaaatgg

SEQ ID NO: 3300 - DNA, 23 bp, Homo sapiens
agtgcgggtcgggagggaaatgg

SEQ ID NO: 3301 - DNA, 23 bp, Homo sapiens
agtgctggcacacagggcccagg

SEQ ID NO: 3302 - DNA, 23 bp, Homo sapiens
agtggacacagctgtgctatggg

SEQ ID NO: 3303 - DNA, 23 bp, Homo sapiens
agtggacgcagctgtgctatggg

SEQ ID NO: 3304 - DNA, 23 bp, Homo sapiens
agtggccctgaccgagacctggg

SEQ ID NO: 3305 - DNA, 23 bp, Homo sapiens
agtggcctcatggtcagagatgg

SEQ ID NO: 3306 - DNA, 23 bp, Homo sapiens
agtgggagcctggggcaaggagg

SEQ ID NO: 3307 - DNA, 23 bp, Homo sapiens
agtgggcgggggggcggggaggg

SEQ ID NO: 3308 - DNA, 23 bp, Homo sapiens
agtgggcggggggggcggggagg

SEQ ID NO: 3309 - DNA, 23 bp, Homo sapiens
agtgggcggggggggtggggtgg

SEQ ID NO: 3310 - DNA, 23 bp, Homo sapiens
agtgggcggggggggtggtgggg

SEQ ID NO: 3311 - DNA, 23 bp, Homo sapiens
agtgggtggggtggcaggtctgg

SEQ ID NO: 3312 - DNA, 23 bp, Homo sapiens
agtgggtggggtggcgggtctgg

SEQ ID NO: 3313 - DNA, 23 bp, Homo sapiens
agtggtcaaagtggtcaaagggg

SEQ ID NO: 3314 - DNA, 23 bp, Homo sapiens
agtggtcgggggtggggcagagg

SEQ ID NO: 3315 - DNA, 23 bp, Homo sapiens
agtggtctggggtggggcagagg

SEQ ID NO: 3316 - DNA, 23 bp, Homo sapiens
agtgtgccccacctcgttactgg

SEQ ID NO: 3317 - DNA, 23 bp, Homo sapiens
agtgtgccccgccttgttactgg

SEQ ID NO: 3318 - DNA, 23 bp, Homo sapiens
agtgtgccctgcctcgttactgg

SEQ ID NO: 3319 - DNA, 23 bp, Homo sapiens
agtgttccctgcatcattactgg

SEQ ID NO: 3320 - DNA, 23 bp, Homo sapiens
agtgttccctgcctcattactgg

SEQ ID NO: 3321 - DNA, 23 bp, Homo sapiens
agttgaggccaaaatccccgcgg

SEQ ID NO: 3322 - DNA, 23 bp, Homo sapiens
agttggggaatccccaaggctgg

SEQ ID NO: 3323 - DNA, 23 bp, Homo sapiens
agttgtggtcatcggagctgtgg

SEQ ID NO: 3324 - DNA, 23 bp, Homo sapiens
agtttaggccaaaatccccgcgg

SEQ ID NO: 3325 - DNA, 23 bp, Homo sapiens
ataatgtatggctgcgacgtggg

SEQ ID NO: 3326 - DNA, 23 bp, Homo sapiens
atacataggaggaagagctcagg

SEQ ID NO: 3327 - DNA, 23 bp, Homo sapiens
atacttctggaaattccttttgg

SEQ ID NO: 3328 - DNA, 23 bp, Homo sapiens
ataggaggaagagctcaggtagg

SEQ ID NO: 3329 - DNA, 23 bp, Homo sapiens
atagggacgtttcgaatgtgtgg

SEQ ID NO: 3330 - DNA, 23 bp, Homo sapiens
atagggcattttcttcccacagg

SEQ ID NO: 3331 - DNA, 23 bp, Homo sapiens
atagttctggaaacttctcttgg

SEQ ID NO: 3332 - DNA, 23 bp, Homo sapiens
atatgtatggctgcgacgtgggg

SEQ ID NO: 3333 - DNA, 23 bp, Homo sapiens
atattgtggttgggagcccatgg

SEQ ID NO: 3334 - DNA, 23 bp, Homo sapiens
atattgtgtttgggagcccatgg

SEQ ID NO: 3335 - DNA, 23 bp, Homo sapiens
atattgtgtttgggagcccgtgg

SEQ ID NO: 3336 - DNA, 23 bp, Homo sapiens
atcactgggatattgtgtttggg

SEQ ID NO: 3337 - DNA, 23 bp, Homo sapiens
atcatgggcccacccagcctggg

SEQ ID NO: 3338 - DNA, 23 bp, Homo sapiens
atcatgggccgacccagcctggg

SEQ ID NO: 3339 - DNA, 23 bp, Homo sapiens
atcatgggcctacccagcctggg

SEQ ID NO: 3340 - DNA, 23 bp, Homo sapiens
atcatgggcctacccagtctggg

SEQ ID NO: 3341 - DNA, 23 bp, Homo sapiens
atccaatacccaatgggagtggg

SEQ ID NO: 3342 - DNA, 23 bp, Homo sapiens
atccacccccctgaggccgcggg

SEQ ID NO: 3343 - DNA, 23 bp, Homo sapiens
atccctcgaatactgatgactgg

SEQ ID NO: 3344 - DNA, 23 bp, Homo sapiens
atccctcgaatactgatgagtgg

SEQ ID NO: 3345 - DNA, 23 bp, Homo sapiens
atccgacacccaatgggagtggg

SEQ ID NO: 3346 - DNA, 23 bp, Homo sapiens
atccgaccccctgaggccgcggg

SEQ ID NO: 3347 - DNA, 23 bp, Homo sapiens
atccgcccccctgaggccgcggg

SEQ ID NO: 3348 - DNA, 23 bp, Homo sapiens
atccgcctccctgaggccgcggg

SEQ ID NO: 3349 - DNA, 23 bp, Homo sapiens
atctcagacccggagactcgggg

SEQ ID NO: 3350 - DNA, 23 bp, Homo sapiens
atctcagaccgggagactcgggg

SEQ ID NO: 3351 - DNA, 23 bp, Homo sapiens
atctcagaccgggagacttgggg

SEQ ID NO: 3352 - DNA, 23 bp, Homo sapiens
atctcagacggggagactcgggg

SEQ ID NO: 3353 - DNA, 23 bp, Homo sapiens
atctcagacggggagactctagg

SEQ ID NO: 3354 - DNA, 23 bp, Homo sapiens
atctcagacggggagactctggg

SEQ ID NO: 3355 - DNA, 23 bp, Homo sapiens
atctcagggtgaggggcttgggg

SEQ ID NO: 3356 - DNA, 23 bp, Homo sapiens
atctcagtgggctacgtggacgg

SEQ ID NO: 3357 - DNA, 23 bp, Homo sapiens
atctcctgcgggctctgaccagg

SEQ ID NO: 3358 - DNA, 23 bp, Homo sapiens
atctcctgtgggctctgaccagg

SEQ ID NO: 3359 - DNA, 23 bp, Homo sapiens
atctcggacccggagactcgggg

SEQ ID NO: 3360 - DNA, 23 bp, Homo sapiens
atctcggacccggagactgtggg

SEQ ID NO: 3361 - DNA, 23 bp, Homo sapiens
atctggagggtgtgagaacctgg

SEQ ID NO: 3362 - DNA, 23 bp, Homo sapiens
atctggatggtgtgagaacctgg

SEQ ID NO: 3363 - DNA, 23 bp, Homo sapiens
atcttctgtgggatctgaccagg

SEQ ID NO: 3364 - DNA, 23 bp, Homo sapiens
atgaagccaccctgaggtgctgg

SEQ ID NO: 3365 - DNA, 23 bp, Homo sapiens
atgaaggaccctacgtaggttgg

SEQ ID NO: 3366 - DNA, 23 bp, Homo sapiens
atgaaggaggctgatgcctgagg

SEQ ID NO: 3367 - DNA, 23 bp, Homo sapiens
atgacccgcatctcggcctctgg

SEQ ID NO: 3368 - DNA, 23 bp, Homo sapiens
atgacccgcatctcggcgtctgg

SEQ ID NO: 3369 - DNA, 23 bp, Homo sapiens
atgaggccaccctgaggtgctgg

SEQ ID NO: 3370 - DNA, 23 bp, Homo sapiens
atgaggccactctgagatgctgg

SEQ ID NO: 3371 - DNA, 23 bp, Homo sapiens
atgaggccactctgaggtgctgg

SEQ ID NO: 3372 - DNA, 23 bp, Homo sapiens
atgaggtcaccctgaggtgctgg

SEQ ID NO: 3373 - DNA, 23 bp, Homo sapiens
atgatgtatggctgccacgtggg

SEQ ID NO: 3374 - DNA, 23 bp, Homo sapiens
atgatgtatggctgcgacgtggg

SEQ ID NO: 3375 - DNA, 23 bp, Homo sapiens
atgatgtgagaccctggccccgg

SEQ ID NO: 3376 - DNA, 23 bp, Homo sapiens
atgatgtttggctgcgacgtggg

SEQ ID NO: 3377 - DNA, 23 bp, Homo sapiens
atgcagggaacacttctacctgg

SEQ ID NO: 3378 - DNA, 23 bp, Homo sapiens
atgcccaagttggggatggtggg

SEQ ID NO: 3379 - DNA, 23 bp, Homo sapiens
atgcccacaatggggatggtggg

SEQ ID NO: 3380 - DNA, 23 bp, Homo sapiens
atgcccacgatggggacggtggg

SEQ ID NO: 3381 - DNA, 23 bp, Homo sapiens
atgcccacgatggggatggtggg

SEQ ID NO: 3382 - DNA, 23 bp, Homo sapiens
atgcccacgatgtggacggtggg

SEQ ID NO: 3383 - DNA, 23 bp, Homo sapiens
atgcccatgatggggatggtagg

SEQ ID NO: 3384 - DNA, 23 bp, Homo sapiens
atgcccatgatggggatggtggg

SEQ ID NO: 3385 - DNA, 23 bp, Homo sapiens
atggacaggacacccgggatggg

SEQ ID NO: 3386 - DNA, 23 bp, Homo sapiens
atggacaggacacctgggatggg

SEQ ID NO: 3387 - DNA, 23 bp, Homo sapiens
atggacaggacacctggggtagg

SEQ ID NO: 3388 - DNA, 23 bp, Homo sapiens
atggacaggacacctggggtggg

SEQ ID NO: 3389 - DNA, 23 bp, Homo sapiens
atggacaggacacctggtgtggg

SEQ ID NO: 3390 - DNA, 23 bp, Homo sapiens
atggacgggacacctggggtggg

SEQ ID NO: 3391 - DNA, 23 bp, Homo sapiens
atggaggggaagacagtccctgg

SEQ ID NO: 3392 - DNA, 23 bp, Homo sapiens
atggagtaaggagggggatgagg

SEQ ID NO: 3393 - DNA, 23 bp, Homo sapiens
atggatagagcaagaggggccgg

SEQ ID NO: 3394 - DNA, 23 bp, Homo sapiens
atggatagagcaggaggggccgg

SEQ ID NO: 3395 - DNA, 23 bp, Homo sapiens
atgggcaggacacctggggtggg

SEQ ID NO: 3396 - DNA, 23 bp, Homo sapiens
atgggggtgtcatgtctcttagg

SEQ ID NO: 3397 - DNA, 23 bp, Homo sapiens
atgggggtgtcatgtcttttagg

SEQ ID NO: 3398 - DNA, 23 bp, Homo sapiens
atggggtaaggagggagacgggg

SEQ ID NO: 3399 - DNA, 23 bp, Homo sapiens
atggggtaaggagggagatgggg

SEQ ID NO: 3400 - DNA, 23 bp, Homo sapiens
atggggtaaggagggggatgagg

SEQ ID NO: 3401 - DNA, 23 bp, Homo sapiens
atggtcagagacgagatggtggg

SEQ ID NO: 3402 - DNA, 23 bp, Homo sapiens
atggtcagagacgggatggtggg

SEQ ID NO: 3403 - DNA, 23 bp, Homo sapiens
atggtcagagacggggtggtggg

SEQ ID NO: 3404 - DNA, 23 bp, Homo sapiens
atggtcagagagggggtggtggg

SEQ ID NO: 3405 - DNA, 23 bp, Homo sapiens
atggtcagagatgggatggtggg

SEQ ID NO: 3406 - DNA, 23 bp, Homo sapiens
atggtcagagatggggtggtggg

SEQ ID NO: 3407 - DNA, 23 bp, Homo sapiens
atggtgtgagaccctggccccgg

SEQ ID NO: 3408 - DNA, 23 bp, Homo sapiens
atggttcccaaggctgctgcagg

SEQ ID NO: 3409 - DNA, 23 bp, Homo sapiens
atgtatcacctcgatggttgtgg

SEQ ID NO: 3410 - DNA, 23 bp, Homo sapiens
atgtatcaccttgatgattatgg

SEQ ID NO: 3411 - DNA, 23 bp, Homo sapiens
atgtatcaccttgatggttgtgg

SEQ ID NO: 3412 - DNA, 23 bp, Homo sapiens
atgtatcaccttggtggttgtgg

SEQ ID NO: 3413 - DNA, 23 bp, Homo sapiens
atgtatcgccttgatggttgtgg

SEQ ID NO: 3414 - DNA, 23 bp, Homo sapiens
atgtcccggacggggctctcagg

SEQ ID NO: 3415 - DNA, 23 bp, Homo sapiens
atgtctctcacagcttgtaaagg

SEQ ID NO: 3416 - DNA, 23 bp, Homo sapiens
atgtgccctgtctcattactggg

SEQ ID NO: 3417 - DNA, 23 bp, Homo sapiens
atgtgccctgtctcattcctggg

SEQ ID NO: 3418 - DNA, 23 bp, Homo sapiens
atgtggaggaagaagagctcagg

SEQ ID NO: 3419 - DNA, 23 bp, Homo sapiens
atgtggaggaggaacagctcagg

SEQ ID NO: 3420 - DNA, 23 bp, Homo sapiens
atgtggaggaggaagagctcagg

SEQ ID NO: 3421 - DNA, 23 bp, Homo sapiens
atgtgggacaagaggaattatgg

SEQ ID NO: 3422 - DNA, 23 bp, Homo sapiens
atgtgtaggaggaagagctcagg

SEQ ID NO: 3423 - DNA, 23 bp, Homo sapiens
atgtgtaggaggaagagttcagg

SEQ ID NO: 3424 - DNA, 23 bp, Homo sapiens
atgttctgtgggatctgaccagg

SEQ ID NO: 3425 - DNA, 23 bp, Homo sapiens
atgtttcctgatcccgccctggg

SEQ ID NO: 3426 - DNA, 23 bp, Homo sapiens
atgtttcctgatcctgccctggg

SEQ ID NO: 3427 - DNA, 23 bp, Homo sapiens
attaaggaatgacgtctctgagg

SEQ ID NO: 3428 - DNA, 23 bp, Homo sapiens
attaagggatgaagtccctgagg

SEQ ID NO: 3429 - DNA, 23 bp, Homo sapiens
attaagggatgaagtccttgagg

SEQ ID NO: 3430 - DNA, 23 bp, Homo sapiens
attaagggatgaagtctctgagg

SEQ ID NO: 3431 - DNA, 23 bp, Homo sapiens
attaagggatgacgtctctgagg

SEQ ID NO: 3432 - DNA, 23 bp, Homo sapiens
attatgagcctacccagcctggg

SEQ ID NO: 3433 - DNA, 23 bp, Homo sapiens
attatgggcctacccagcctggg

SEQ ID NO: 3434 - DNA, 23 bp, Homo sapiens
attcatatccatcacagtgaggg

SEQ ID NO: 3435 - DNA, 23 bp, Homo sapiens
attccagcattcatgagtcaggg

SEQ ID NO: 3436 - DNA, 23 bp, Homo sapiens
attccagcattcgtgagtcaggg

SEQ ID NO: 3437 - DNA, 23 bp, Homo sapiens
attcgaaacgtcccaatcaaagg

SEQ ID NO: 3438 - DNA, 23 bp, Homo sapiens
attcgaaacgtccctatcaaagg

SEQ ID NO: 3439 - DNA, 23 bp, Homo sapiens
attcgtatctgtcacagtgaggg

SEQ ID NO: 3440 - DNA, 23 bp, Homo sapiens
attctgggagctgaagtggtcgg

SEQ ID NO: 3441 - DNA, 23 bp, Homo sapiens
attgctggcctagttctctttgg

SEQ ID NO: 3442 - DNA, 23 bp, Homo sapiens
attgctggcctggttctccttgg

SEQ ID NO: 3443 - DNA, 23 bp, Homo sapiens
attgctggcctggttctctttgg

SEQ ID NO: 3444 - DNA, 23 bp, Homo sapiens
attgggacgtttcgaatgtgtgg

SEQ ID NO: 3445 - DNA, 23 bp, Homo sapiens
attgggacgtttcgagtgtgtgg

SEQ ID NO: 3446 - DNA, 23 bp, Homo sapiens
attgggatgttacgcgtgtgtgg

SEQ ID NO: 3447 - DNA, 23 bp, Homo sapiens
attgggatgtttcgcgtgtgtgg

SEQ ID NO: 3448 - DNA, 23 bp, Homo sapiens
attggggaggcgcagcattgggg

SEQ ID NO: 3449 - DNA, 23 bp, Homo sapiens
attggggaggcgcagcgttgggg

SEQ ID NO: 3450 - DNA, 23 bp, Homo sapiens
attggggaggcgccgcgttgggg

SEQ ID NO: 3451 - DNA, 23 bp, Homo sapiens
attggggagtcacagccttgggg

SEQ ID NO: 3452 - DNA, 23 bp, Homo sapiens
attggggagtcccagccttgggg

SEQ ID NO: 3453 - DNA, 23 bp, Homo sapiens
attgtcctagagagaagaggggg

SEQ ID NO: 3454 - DNA, 23 bp, Homo sapiens
attgtcctagagagcagacgggg

SEQ ID NO: 3455 - DNA, 23 bp, Homo sapiens
attgtcctagagagcagaggggg

SEQ ID NO: 3456 - DNA, 23 bp, Homo sapiens
attgtggttgggagcccatgggg

SEQ ID NO: 3457 - DNA, 23 bp, Homo sapiens
attgtgtttgggagcccatgggg

SEQ ID NO: 3458 - DNA, 23 bp, Homo sapiens
attgtgtttgggagcccgtgggg

SEQ ID NO: 3459 - DNA, 23 bp, Homo sapiens
atttatcaccttgattacagcgg

SEQ ID NO: 3460 - DNA, 23 bp, Homo sapiens
atttatcaccttgattacggcgg

SEQ ID NO: 3461 - DNA, 23 bp, Homo sapiens
atttatcaccttgattatggcgg

SEQ ID NO: 3462 - DNA, 23 bp, Homo sapiens
atttcaccacatccgtgtcccgg

SEQ ID NO: 3463 - DNA, 23 bp, Homo sapiens
atttcagcattcatgagtcaggg

SEQ ID NO: 3464 - DNA, 23 bp, Homo sapiens
atttccacaccgccatgtcccgg

SEQ ID NO: 3465 - DNA, 23 bp, Homo sapiens
atttccacacctccgtgtcccgg

SEQ ID NO: 3466 - DNA, 23 bp, Homo sapiens
atttcgacaccgccatgtcccgg

SEQ ID NO: 3467 - DNA, 23 bp, Homo sapiens
atttcgacaccgccgtgtcccgg

SEQ ID NO: 3468 - DNA, 23 bp, Homo sapiens
atttctacaccgccatgtcccgg

SEQ ID NO: 3469 - DNA, 23 bp, Homo sapiens
atttctacaccgccgtgtcccgg

SEQ ID NO: 3470 - DNA, 23 bp, Homo sapiens
atttctacaccgctgtgtcccgg

SEQ ID NO: 3471 - DNA, 23 bp, Homo sapiens
atttctacacctccatgtcccgg

SEQ ID NO: 3472 - DNA, 23 bp, Homo sapiens
atttctacacctccgtgtcccgg

SEQ ID NO: 3473 - DNA, 23 bp, Homo sapiens
atttctacacttccgtgtcccgg

SEQ ID NO: 3474 - DNA, 23 bp, Homo sapiens
atttctccacatccgtgtcccgg

SEQ ID NO: 3475 - DNA, 23 bp, Homo sapiens
atttctccacatccgtgtcctgg

SEQ ID NO: 3476 - DNA, 23 bp, Homo sapiens
atttcttcacatccgtgtcccgg

SEQ ID NO: 3477 - DNA, 23 bp, Homo sapiens
caaaatccccgcgggttgggcgg

SEQ ID NO: 3478 - DNA, 23 bp, Homo sapiens
caaaatccccgcgggttggtcgg

SEQ ID NO: 3479 - DNA, 23 bp, Homo sapiens
caaaatggccacatgcgtgctgg

SEQ ID NO: 3480 - DNA, 23 bp, Homo sapiens
caaagagaaccaggccagcaagg

SEQ ID NO: 3481 - DNA, 23 bp, Homo sapiens
caaagcccctcaccctgagatgg

SEQ ID NO: 3482 - DNA, 23 bp, Homo sapiens
caacacacagacttaccgagagg

SEQ ID NO: 3483 - DNA, 23 bp, Homo sapiens
caacacacatcaggccctccagg

SEQ ID NO: 3484 - DNA, 23 bp, Homo sapiens
caacagccaccacagctcctagg

SEQ ID NO: 3485 - DNA, 23 bp, Homo sapiens
caacagccaccatagctcctagg

SEQ ID NO: 3486 - DNA, 23 bp, Homo sapiens
caacagccatcacagctcctagg

SEQ ID NO: 3487 - DNA, 23 bp, Homo sapiens
caacagtcatgaacaaattctgg

SEQ ID NO: 3488 - DNA, 23 bp, Homo sapiens
caacgagaagaagaggaaaatgg

SEQ ID NO: 3489 - DNA, 23 bp, Homo sapiens
caagacccgggaagccgcgccgg

SEQ ID NO: 3490 - DNA, 23 bp, Homo sapiens
caagactaggaggttcctctagg

SEQ ID NO: 3491 - DNA, 23 bp, Homo sapiens
caagacttggaggttcctctagg

SEQ ID NO: 3492 - DNA, 23 bp, Homo sapiens
caagatagccacatgtgtgctgg

SEQ ID NO: 3493 - DNA, 23 bp, Homo sapiens
caagatggccacatgcatgctgg

SEQ ID NO: 3494 - DNA, 23 bp, Homo sapiens
caagatggccacatgcgtgctgg

SEQ ID NO: 3495 - DNA, 23 bp, Homo sapiens
caagcccctcaccctgagatggg

SEQ ID NO: 3496 - DNA, 23 bp, Homo sapiens
caagctcagtgtcctgagtttgg

SEQ ID NO: 3497 - DNA, 23 bp, Homo sapiens
caagctccgtgtcctgggtctgg

SEQ ID NO: 3498 - DNA, 23 bp, Homo sapiens
caagctcggtgtcctgagtttgg

SEQ ID NO: 3499 - DNA, 23 bp, Homo sapiens
caagctcggtgtcctgggtctgg

SEQ ID NO: 3500 - DNA, 23 bp, Homo sapiens
caaggacagctaggacaaccagg

SEQ ID NO: 3501 - DNA, 23 bp, Homo sapiens
caaggcacagactgaccgagagg

SEQ ID NO: 3502 - DNA, 23 bp, Homo sapiens
caaggctacgaggttcctctagg

SEQ ID NO: 3503 - DNA, 23 bp, Homo sapiens
caagggccgtgtctgcactgggg

SEQ ID NO: 3504 - DNA, 23 bp, Homo sapiens
caagggccgtgtctgcattgggg

SEQ ID NO: 3505 - DNA, 23 bp, Homo sapiens
caagtcacaaagggaagggcagg

SEQ ID NO: 3506 - DNA, 23 bp, Homo sapiens
caagtgggagacggcccatgagg

SEQ ID NO: 3507 - DNA, 23 bp, Homo sapiens
caagtgggaggcggcccatgagg

SEQ ID NO: 3508 - DNA, 23 bp, Homo sapiens
caagtgggaggcggcccatgcgg

SEQ ID NO: 3509 - DNA, 23 bp, Homo sapiens
caagtgggaggcggcccatgtgg

SEQ ID NO: 3510 - DNA, 23 bp, Homo sapiens
caagtgggaggcggcccgtacgg

SEQ ID NO: 3511 - DNA, 23 bp, Homo sapiens
caagtgggaggcggcccgtcggg

SEQ ID NO: 3512 - DNA, 23 bp, Homo sapiens
caagtgggaggcggcccgtgagg

SEQ ID NO: 3513 - DNA, 23 bp, Homo sapiens
caagtgggaggcggcccgtgcgg

SEQ ID NO: 3514 - DNA, 23 bp, Homo sapiens
caagtgggaggcggcccgtgtgg

SEQ ID NO: 3515 - DNA, 23 bp, Homo sapiens
caagtgggaggcggcccgttggg

SEQ ID NO: 3516 - DNA, 23 bp, Homo sapiens
caagtgggaggcggtccatgcgg

SEQ ID NO: 3517 - DNA, 23 bp, Homo sapiens
caagtgtgagaccctggcccagg

SEQ ID NO: 3518 - DNA, 23 bp, Homo sapiens
caagtgtgagaccctggccccgg

SEQ ID NO: 3519 - DNA, 23 bp, Homo sapiens
caagttggaggcggcccgtgagg

SEQ ID NO: 3520 - DNA, 23 bp, Homo sapiens
caagttggaggcggcccgtgcgg

SEQ ID NO: 3521 - DNA, 23 bp, Homo sapiens
caagttggaggcggcccgtgtgg

SEQ ID NO: 3522 - DNA, 23 bp, Homo sapiens
caagttggggatggtgggctggg

SEQ ID NO: 3523 - DNA, 23 bp, Homo sapiens
caatagtcatgaacaaattcagg

SEQ ID NO: 3524 - DNA, 23 bp, Homo sapiens
caatccaccgtccccatcgtggg

SEQ ID NO: 3525 - DNA, 23 bp, Homo sapiens
caatccatacaccgccttcgggg

SEQ ID NO: 3526 - DNA, 23 bp, Homo sapiens
caatccatataccgccttcgggg

SEQ ID NO: 3527 - DNA, 23 bp, Homo sapiens
caatgaagcggggctccccgcgg

SEQ ID NO: 3528 - DNA, 23 bp, Homo sapiens
caatggggaggcgcagcgttggg

SEQ ID NO: 3529 - DNA, 23 bp, Homo sapiens
caattgtctcccctccttgtggg

SEQ ID NO: 3530 - DNA, 23 bp, Homo sapiens
cacaaggaggggagacaattggg

SEQ ID NO: 3531 - DNA, 23 bp, Homo sapiens
cacaatatcccaaggacctcagg

SEQ ID NO: 3532 - DNA, 23 bp, Homo sapiens
cacaatggggatggtgggctggg

SEQ ID NO: 3533 - DNA, 23 bp, Homo sapiens
cacacacaggcagcagccttggg

SEQ ID NO: 3534 - DNA, 23 bp, Homo sapiens
cacacaccggcagcagccttggg

SEQ ID NO: 3535 - DNA, 23 bp, Homo sapiens
cacacaccggcggcagccttggg

SEQ ID NO: 3536 - DNA, 23 bp, Homo sapiens
cacacagggcccaggctgggtgg

SEQ ID NO: 3537 - DNA, 23 bp, Homo sapiens
cacaccatccagaggatgtatgg

SEQ ID NO: 3538 - DNA, 23 bp, Homo sapiens
cacaccatccagaggatgtctgg

SEQ ID NO: 3539 - DNA, 23 bp, Homo sapiens
cacaccatccagataatgtatgg

SEQ ID NO: 3540 - DNA, 23 bp, Homo sapiens
cacaccatccagatgatgtatgg

SEQ ID NO: 3541 - DNA, 23 bp, Homo sapiens
cacaccctccagaatatgtatgg

SEQ ID NO: 3542 - DNA, 23 bp, Homo sapiens
cacaccctccagagcatgtacgg

SEQ ID NO: 3543 - DNA, 23 bp, Homo sapiens
cacaccctccagaggatgtacgg

SEQ ID NO: 3544 - DNA, 23 bp, Homo sapiens
cacaccctccagaggatgtatgg

SEQ ID NO: 3545 - DNA, 23 bp, Homo sapiens
cacaccctccagaggatgtctgg

SEQ ID NO: 3546 - DNA, 23 bp, Homo sapiens
cacaccctccagaggatgtttgg

SEQ ID NO: 3547 - DNA, 23 bp, Homo sapiens
cacaccctccagatgatgtttgg

SEQ ID NO: 3548 - DNA, 23 bp, Homo sapiens
cacaccctccagtggatgtacgg

SEQ ID NO: 3549 - DNA, 23 bp, Homo sapiens
cacaccctccagtggatgtatgg

SEQ ID NO: 3550 - DNA, 23 bp, Homo sapiens
cacaccctccagtggatgtgtgg

SEQ ID NO: 3551 - DNA, 23 bp, Homo sapiens
cacaccctccagtggatgtttgg

SEQ ID NO: 3552 - DNA, 23 bp, Homo sapiens
cacaccgccatgtcccggcccgg

SEQ ID NO: 3553 - DNA, 23 bp, Homo sapiens
cacaccgtccagaggatgtatgg

SEQ ID NO: 3554 - DNA, 23 bp, Homo sapiens
cacacctccgtgtcccggcccgg

SEQ ID NO: 3555 - DNA, 23 bp, Homo sapiens
cacaccttccagaggatgtatgg

SEQ ID NO: 3556 - DNA, 23 bp, Homo sapiens
cacacttggcagacgatgtatgg

SEQ ID NO: 3557 - DNA, 23 bp, Homo sapiens
cacacttggcagaggatgtatgg

SEQ ID NO: 3558 - DNA, 23 bp, Homo sapiens
cacagacgcccacttctggaagg

SEQ ID NO: 3559 - DNA, 23 bp, Homo sapiens
cacagccacccacttctggaagg

SEQ ID NO: 3560 - DNA, 23 bp, Homo sapiens
cacagccgcccacttctggaagg

SEQ ID NO: 3561 - DNA, 23 bp, Homo sapiens
cacagctgcccacttctggaagg

SEQ ID NO: 3562 - DNA, 23 bp, Homo sapiens
cacagctgtccacttctggaagg

SEQ ID NO: 3563 - DNA, 23 bp, Homo sapiens
cacaggagacgtgggacaggagg

SEQ ID NO: 3564 - DNA, 23 bp, Homo sapiens
cacaggagatgtgggacaagagg

SEQ ID NO: 3565 - DNA, 23 bp, Homo sapiens
cacaggcccaggtctcggtcagg

SEQ ID NO: 3566 - DNA, 23 bp, Homo sapiens
cacaggggctaacacagcctggg

SEQ ID NO: 3567 - DNA, 23 bp, Homo sapiens
cacaggggctaacgcagactggg

SEQ ID NO: 3568 - DNA, 23 bp, Homo sapiens
cacaggggctaacgcagcctggg

SEQ ID NO: 3569 - DNA, 23 bp, Homo sapiens
cacaggggctaatgcagcctggg

SEQ ID NO: 3570 - DNA, 23 bp, Homo sapiens
cacagggtcccaggctgggatgg

SEQ ID NO: 3571 - DNA, 23 bp, Homo sapiens
cacaggtcagcgtgggaagaggg

SEQ ID NO: 3572 - DNA, 23 bp, Homo sapiens
cacatcatccagaggatgtacgg

SEQ ID NO: 3573 - DNA, 23 bp, Homo sapiens
cacatcatccagaggatgtatgg

SEQ ID NO: 3574 - DNA, 23 bp, Homo sapiens
cacatcatccaggtgatgtatgg

SEQ ID NO: 3575 - DNA, 23 bp, Homo sapiens
cacatcctccagaggatgtatgg

SEQ ID NO: 3576 - DNA, 23 bp, Homo sapiens
cacatcgtgggcatcattgctgg

SEQ ID NO: 3577 - DNA, 23 bp, Homo sapiens
cacatgccatgtacagcatgagg

SEQ ID NO: 3578 - DNA, 23 bp, Homo sapiens
cacatgggccatcccagcctggg

SEQ ID NO: 3579 - DNA, 23 bp, Homo sapiens
cacatttctggaaacttctctgg

SEQ ID NO: 3580 - DNA, 23 bp, Homo sapiens
caccaagcacaagtgggagacgg

SEQ ID NO: 3581 - DNA, 23 bp, Homo sapiens
caccaagcacaagtgggaggcgg

SEQ ID NO: 3582 - DNA, 23 bp, Homo sapiens
caccaagcgcaagtgggaggcgg

SEQ ID NO: 3583 - DNA, 23 bp, Homo sapiens
caccagcccaggtctcggtcagg

SEQ ID NO: 3584 - DNA, 23 bp, Homo sapiens
caccagcggatgcaggcacctgg

SEQ ID NO: 3585 - DNA, 23 bp, Homo sapiens
cacccaatgggagtgagaactgg

SEQ ID NO: 3586 - DNA, 23 bp, Homo sapiens
cacccaatgggagtgggaaatgg

SEQ ID NO: 3587 - DNA, 23 bp, Homo sapiens
cacccaatgggagtgggaagtgg

SEQ ID NO: 3588 - DNA, 23 bp, Homo sapiens
cacccaatgggagtgggaattgg

SEQ ID NO: 3589 - DNA, 23 bp, Homo sapiens
cacccagcgcaagtgggagacgg

SEQ ID NO: 3590 - DNA, 23 bp, Homo sapiens
cacccagcgcaagtgggaggcgg

SEQ ID NO: 3591 - DNA, 23 bp, Homo sapiens
cacccagcgcaagttggaggcgg

SEQ ID NO: 3592 - DNA, 23 bp, Homo sapiens
cacccagctcaagtgggaggcgg

SEQ ID NO: 3593 - DNA, 23 bp, Homo sapiens
cacccgacacccaatgggagtgg

SEQ ID NO: 3594 - DNA, 23 bp, Homo sapiens
cacccgcccaggtctgggtcagg

SEQ ID NO: 3595 - DNA, 23 bp, Homo sapiens
cacccgccctggtctgggtcagg

SEQ ID NO: 3596 - DNA, 23 bp, Homo sapiens
caccctccctctgctcctgaggg

SEQ ID NO: 3597 - DNA, 23 bp, Homo sapiens
caccctccctctggtcctgaggg

SEQ ID NO: 3598 - DNA, 23 bp, Homo sapiens
caccctgagatggagtaaggagg

SEQ ID NO: 3599 - DNA, 23 bp, Homo sapiens
caccctgagatggggtaaggagg

SEQ ID NO: 3600 - DNA, 23 bp, Homo sapiens
caccctgagctggggtaaggagg

SEQ ID NO: 3601 - DNA, 23 bp, Homo sapiens
caccctgaggtgctgggccctgg

SEQ ID NO: 3602 - DNA, 23 bp, Homo sapiens
caccggcccaggtctcgatcagg

SEQ ID NO: 3603 - DNA, 23 bp, Homo sapiens
caccggcccaggtctcggtcagg

SEQ ID NO: 3604 - DNA, 23 bp, Homo sapiens
caccggtccaggtctcgatcagg

SEQ ID NO: 3605 - DNA, 23 bp, Homo sapiens
caccgtggatagagcaggagggg

SEQ ID NO: 3606 - DNA, 23 bp, Homo sapiens
cacctccctgcgcggctccccgg

SEQ ID NO: 3607 - DNA, 23 bp, Homo sapiens
cacctcgatggttgtggtgttgg

SEQ ID NO: 3608 - DNA, 23 bp, Homo sapiens
cacctcgttcctctccgcagagg

SEQ ID NO: 3609 - DNA, 23 bp, Homo sapiens
cacctgccatgtgcagcatgagg

SEQ ID NO: 3610 - DNA, 23 bp, Homo sapiens
cacctgcccaggtctgggtcagg

SEQ ID NO: 3611 - DNA, 23 bp, Homo sapiens
cacctgggccatcccagcctggg

SEQ ID NO: 3612 - DNA, 23 bp, Homo sapiens
caccttcccctcctttcccaggg

SEQ ID NO: 3613 - DNA, 23 bp, Homo sapiens
caccttgatgattatggtgttgg

SEQ ID NO: 3614 - DNA, 23 bp, Homo sapiens
caccttgatggttgtggtgttgg

SEQ ID NO: 3615 - DNA, 23 bp, Homo sapiens
caccttgattacagcggtgatgg

SEQ ID NO: 3616 - DNA, 23 bp, Homo sapiens
caccttgattacggcagtgatgg

SEQ ID NO: 3617 - DNA, 23 bp, Homo sapiens
caccttgattacggcggtgatgg

SEQ ID NO: 3618 - DNA, 23 bp, Homo sapiens
caccttgattatggcggtgatgg

SEQ ID NO: 3619 - DNA, 23 bp, Homo sapiens
caccttggtggttgtggtgttgg

SEQ ID NO: 3620 - DNA, 23 bp, Homo sapiens
cacgagaagaagaggaaaatggg

SEQ ID NO: 3621 - DNA, 23 bp, Homo sapiens
cacgagaagaggaggaaaatggg

SEQ ID NO: 3622 - DNA, 23 bp, Homo sapiens
cacgaggaggggaggaaaatggg

SEQ ID NO: 3623 - DNA, 23 bp, Homo sapiens
cacgatggggacggtggactggg

SEQ ID NO: 3624 - DNA, 23 bp, Homo sapiens
cacgatggggacggtggattggg

SEQ ID NO: 3625 - DNA, 23 bp, Homo sapiens
cacgatggggacggtgggctggg

SEQ ID NO: 3626 - DNA, 23 bp, Homo sapiens
cacgatggggatggtggactggg

SEQ ID NO: 3627 - DNA, 23 bp, Homo sapiens
cacgatggggatggtgggctggg

SEQ ID NO: 3628 - DNA, 23 bp, Homo sapiens
cacgatgtggacggtgggctggg

SEQ ID NO: 3629 - DNA, 23 bp, Homo sapiens
cacgcacaggccctccaggtagg

SEQ ID NO: 3630 - DNA, 23 bp, Homo sapiens
cacgcaccggccctccaggtagg

SEQ ID NO: 3631 - DNA, 23 bp, Homo sapiens
cacgcacgtgccatccaggtagg

SEQ ID NO: 3632 - DNA, 23 bp, Homo sapiens
cacgcacgtgccctccaggtagg

SEQ ID NO: 3633 - DNA, 23 bp, Homo sapiens
cacgcactcgccctccaggtagg

SEQ ID NO: 3634 - DNA, 23 bp, Homo sapiens
cacgggcccaaggctgccgccgg

SEQ ID NO: 3635 - DNA, 23 bp, Homo sapiens
cacgggcccaaggctgctgccgg

SEQ ID NO: 3636 - DNA, 23 bp, Homo sapiens
cacgggtaccaggggccacgggg

SEQ ID NO: 3637 - DNA, 23 bp, Homo sapiens
cacgggtaccgggggccacgggg

SEQ ID NO: 3638 - DNA, 23 bp, Homo sapiens
cacggtcccaaggctgctgccgg

SEQ ID NO: 3639 - DNA, 23 bp, Homo sapiens
cacgtgccatatgcagcacgagg

SEQ ID NO: 3640 - DNA, 23 bp, Homo sapiens
cacgtgccatgtgcagcacgagg

SEQ ID NO: 3641 - DNA, 23 bp, Homo sapiens
cacgtgccatgttcagcacgagg

SEQ ID NO: 3642 - DNA, 23 bp, Homo sapiens
cacgtgggccatcccagcctggg

SEQ ID NO: 3643 - DNA, 23 bp, Homo sapiens
cactacaaccagagcgaggccgg

SEQ ID NO: 3644 - DNA, 23 bp, Homo sapiens
cactcggtcaatctgtgagtggg

SEQ ID NO: 3645 - DNA, 23 bp, Homo sapiens
cactcggtcagtctgtgactggg

SEQ ID NO: 3646 - DNA, 23 bp, Homo sapiens
cactcggtcagtctgtgagtggg

SEQ ID NO: 3647 - DNA, 23 bp, Homo sapiens
cactcggtgagtctgtgagtggg

SEQ ID NO: 3648 - DNA, 23 bp, Homo sapiens
cactctgagatgctgggccctgg

SEQ ID NO: 3649 - DNA, 23 bp, Homo sapiens
cactgacctggcagcgggatggg

SEQ ID NO: 3650 - DNA, 23 bp, Homo sapiens
cactgacctggcagtgggatggg

SEQ ID NO: 3651 - DNA, 23 bp, Homo sapiens
cactgagggttccaagacccagg

SEQ ID NO: 3652 - DNA, 23 bp, Homo sapiens
cactggagggtgtgagaccctgg

SEQ ID NO: 3653 - DNA, 23 bp, Homo sapiens
cactgggagtttcaagccccagg

SEQ ID NO: 3654 - DNA, 23 bp, Homo sapiens
cactggggaggcgccgcgttggg

SEQ ID NO: 3655 - DNA, 23 bp, Homo sapiens
cactgggggtttcaagccccagg

SEQ ID NO: 3656 - DNA, 23 bp, Homo sapiens
cacttctcccaacctgcgtcggg

SEQ ID NO: 3657 - DNA, 23 bp, Homo sapiens
cacttgtaaaggtgagattctgg

SEQ ID NO: 3658 - DNA, 23 bp, Homo sapiens
cactttacctccactcagatcgg

SEQ ID NO: 3659 - DNA, 23 bp, Homo sapiens
cagaaacgatgcccaagttgggg

SEQ ID NO: 3660 - DNA, 23 bp, Homo sapiens
cagacacctggagaacgggaagg

SEQ ID NO: 3661 - DNA, 23 bp, Homo sapiens
cagacactttgcatctctcttgg

SEQ ID NO: 3662 - DNA, 23 bp, Homo sapiens
cagaccagggcgggtgagtgcgg

SEQ ID NO: 3663 - DNA, 23 bp, Homo sapiens
cagacctgggcaggtgagtgcgg

SEQ ID NO: 3664 - DNA, 23 bp, Homo sapiens
cagacctgggcgggtgagtgcgg

SEQ ID NO: 3665 - DNA, 23 bp, Homo sapiens
cagacgccagcctggacacaggg

SEQ ID NO: 3666 - DNA, 23 bp, Homo sapiens
cagactaaccgagcgaacctggg

SEQ ID NO: 3667 - DNA, 23 bp, Homo sapiens
cagactcaccgagtggacctggg

SEQ ID NO: 3668 - DNA, 23 bp, Homo sapiens
cagactgaccgagagaacctggg

SEQ ID NO: 3669 - DNA, 23 bp, Homo sapiens
cagactgaccgagcgaacctggg

SEQ ID NO: 3670 - DNA, 23 bp, Homo sapiens
cagactgaccgagtggacctggg

SEQ ID NO: 3671 - DNA, 23 bp, Homo sapiens
cagagcccctcaccctgagatgg

SEQ ID NO: 3672 - DNA, 23 bp, Homo sapiens
cagagggagaaaagaaactgcgg

SEQ ID NO: 3673 - DNA, 23 bp, Homo sapiens
cagagtaagtgctagcacacagg

SEQ ID NO: 3674 - DNA, 23 bp, Homo sapiens
cagagtaagtgctggcacacagg

SEQ ID NO: 3675 - DNA, 23 bp, Homo sapiens
cagatacctgaagaacgggaagg

SEQ ID NO: 3676 - DNA, 23 bp, Homo sapiens
cagatacctgaagaatgggaagg

SEQ ID NO: 3677 - DNA, 23 bp, Homo sapiens
cagatacctggagaacgggaagg

SEQ ID NO: 3678 - DNA, 23 bp, Homo sapiens
cagattctccccagaccccgagg

SEQ ID NO: 3679 - DNA, 23 bp, Homo sapiens
cagattctccccagacgccgagg

SEQ ID NO: 3680 - DNA, 23 bp, Homo sapiens
cagattgaccgagtggacctggg

SEQ ID NO: 3681 - DNA, 23 bp, Homo sapiens
cagatttatcaccttgattacgg

SEQ ID NO: 3682 - DNA, 23 bp, Homo sapiens
cagatttatcaccttgattatgg

SEQ ID NO: 3683 - DNA, 23 bp, Homo sapiens
cagcaacaatgcccacgatgggg

SEQ ID NO: 3684 - DNA, 23 bp, Homo sapiens
cagcaacgatgcccacgatgggg

SEQ ID NO: 3685 - DNA, 23 bp, Homo sapiens
cagcaacgatgcccatgatgggg

SEQ ID NO: 3686 - DNA, 23 bp, Homo sapiens
cagcaaggatgcccacgatgggg

SEQ ID NO: 3687 - DNA, 23 bp, Homo sapiens
cagcaatgatgcccacaatgggg

SEQ ID NO: 3688 - DNA, 23 bp, Homo sapiens
cagcaatgatgcccacgatgggg

SEQ ID NO: 3689 - DNA, 23 bp, Homo sapiens
cagcaatgatgcccacgatgtgg

SEQ ID NO: 3690 - DNA, 23 bp, Homo sapiens
cagcagagagcctacctggaggg

SEQ ID NO: 3691 - DNA, 23 bp, Homo sapiens
cagcagagagcctacctggatgg

SEQ ID NO: 3692 - DNA, 23 bp, Homo sapiens
cagcagcgaccacagctcctagg

SEQ ID NO: 3693 - DNA, 23 bp, Homo sapiens
cagccattttgcatctgtcatgg

SEQ ID NO: 3694 - DNA, 23 bp, Homo sapiens
cagcccaccatccccaacttggg

SEQ ID NO: 3695 - DNA, 23 bp, Homo sapiens
cagcccaccatccccatcatggg

SEQ ID NO: 3696 - DNA, 23 bp, Homo sapiens
cagcccaccatccccatcgtggg

SEQ ID NO: 3697 - DNA, 23 bp, Homo sapiens
cagcccaccatccccattgtggg

SEQ ID NO: 3698 - DNA, 23 bp, Homo sapiens
cagcccaccgtccacatcgtggg

SEQ ID NO: 3699 - DNA, 23 bp, Homo sapiens
cagcccaccgtccccatcgtggg

SEQ ID NO: 3700 - DNA, 23 bp, Homo sapiens
cagccccacctctctgcaacagg

SEQ ID NO: 3701 - DNA, 23 bp, Homo sapiens
cagccccacctctctggaacagg

SEQ ID NO: 3702 - DNA, 23 bp, Homo sapiens
cagcctaccatccccatcatggg

SEQ ID NO: 3703 - DNA, 23 bp, Homo sapiens
cagcctggacacaggcacctggg

SEQ ID NO: 3704 - DNA, 23 bp, Homo sapiens
cagcctggacacagggacctggg

SEQ ID NO: 3705 - DNA, 23 bp, Homo sapiens
cagcctggacgcaggcacctggg

SEQ ID NO: 3706 - DNA, 23 bp, Homo sapiens
cagcggagagcctacctggaggg

SEQ ID NO: 3707 - DNA, 23 bp, Homo sapiens
cagcggagagtctacctggaggg

SEQ ID NO: 3708 - DNA, 23 bp, Homo sapiens
cagctactacaaccagagcgagg

SEQ ID NO: 3709 - DNA, 23 bp, Homo sapiens
cagctgagaacctacctggaggg

SEQ ID NO: 3710 - DNA, 23 bp, Homo sapiens
cagctgagagcctacctggaggg

SEQ ID NO: 3711 - DNA, 23 bp, Homo sapiens
caggaagaaggacccgacgcagg

SEQ ID NO: 3712 - DNA, 23 bp, Homo sapiens
caggaagaaggacccgtcgcagg

SEQ ID NO: 3713 - DNA, 23 bp, Homo sapiens
caggaagaaggaccctacatagg

SEQ ID NO: 3714 - DNA, 23 bp, Homo sapiens
caggaagagtcagaacattcagg

SEQ ID NO: 3715 - DNA, 23 bp, Homo sapiens
caggaagagtcagatcattcagg

SEQ ID NO: 3716 - DNA, 23 bp, Homo sapiens
caggacacctgggatggggaagg

SEQ ID NO: 3717 - DNA, 23 bp, Homo sapiens
caggacacctggggtagggaagg

SEQ ID NO: 3718 - DNA, 23 bp, Homo sapiens
caggacacctggggtggggaagg

SEQ ID NO: 3719 - DNA, 23 bp, Homo sapiens
caggacacctggtgtggggaagg

SEQ ID NO: 3720 - DNA, 23 bp, Homo sapiens
caggacagagcctacctggaggg

SEQ ID NO: 3721 - DNA, 23 bp, Homo sapiens
caggacccgggaagccgcgccgg

SEQ ID NO: 3722 - DNA, 23 bp, Homo sapiens
caggacccggggagccgcgcagg

SEQ ID NO: 3723 - DNA, 23 bp, Homo sapiens
caggacccggggagccgcgccgg

SEQ ID NO: 3724 - DNA, 23 bp, Homo sapiens
caggacccggggagcggcgcagg

SEQ ID NO: 3725 - DNA, 23 bp, Homo sapiens
caggacccgggtagccgcgccgg

SEQ ID NO: 3726 - DNA, 23 bp, Homo sapiens
caggaccgggggagccgcgccgg

SEQ ID NO: 3727 - DNA, 23 bp, Homo sapiens
caggacctgaggagccgcgccgg

SEQ ID NO: 3728 - DNA, 23 bp, Homo sapiens
caggacgaagtcccaggccccgg

SEQ ID NO: 3729 - DNA, 23 bp, Homo sapiens
caggacgaagtcccaggtcccgg

SEQ ID NO: 3730 - DNA, 23 bp, Homo sapiens
caggacgaagtcccatgtcccgg

SEQ ID NO: 3731 - DNA, 23 bp, Homo sapiens
caggaggattcctctccctcagg

SEQ ID NO: 3732 - DNA, 23 bp, Homo sapiens
caggatgaaggaccctacgtagg

SEQ ID NO: 3733 - DNA, 23 bp, Homo sapiens
caggcattttgcatctgtaatgg

SEQ ID NO: 3734 - DNA, 23 bp, Homo sapiens
caggcattttgcatctgtcatgg

SEQ ID NO: 3735 - DNA, 23 bp, Homo sapiens
caggccccgaaggcggtatatgg

SEQ ID NO: 3736 - DNA, 23 bp, Homo sapiens
caggccccgaaggcggtgtatgg

SEQ ID NO: 3737 - DNA, 23 bp, Homo sapiens
caggcgctttgcatctctcatgg

SEQ ID NO: 3738 - DNA, 23 bp, Homo sapiens
caggcgctttgcatctttcatgg

SEQ ID NO: 3739 - DNA, 23 bp, Homo sapiens
caggcgggggcgcaggacccggg

SEQ ID NO: 3740 - DNA, 23 bp, Homo sapiens
caggcgggggctcaggacccggg

SEQ ID NO: 3741 - DNA, 23 bp, Homo sapiens
caggctgcaagtaagtatgaagg

SEQ ID NO: 3742 - DNA, 23 bp, Homo sapiens
caggctgcgtgtaagtgatgggg

SEQ ID NO: 3743 - DNA, 23 bp, Homo sapiens
caggctgcgtgtaagtggtgggg

SEQ ID NO: 3744 - DNA, 23 bp, Homo sapiens
cagggcaggatcaggaaacacgg

SEQ ID NO: 3745 - DNA, 23 bp, Homo sapiens
cagggcaggatcaggaaacatgg

SEQ ID NO: 3746 - DNA, 23 bp, Homo sapiens
cagggcccagcacctcagagtgg

SEQ ID NO: 3747 - DNA, 23 bp, Homo sapiens
cagggcccagcacctcagggtgg

SEQ ID NO: 3748 - DNA, 23 bp, Homo sapiens
cagggcccagcatctcagagtgg

SEQ ID NO: 3749 - DNA, 23 bp, Homo sapiens
cagggcggggcggggctcggggg

SEQ ID NO: 3750 - DNA, 23 bp, Homo sapiens
cagggtacttcaagtcacaaagg

SEQ ID NO: 3751 - DNA, 23 bp, Homo sapiens
cagggtctcacaccatccagagg

SEQ ID NO: 3752 - DNA, 23 bp, Homo sapiens
cagggtctcacaccctccagagg

SEQ ID NO: 3753 - DNA, 23 bp, Homo sapiens
cagggtctcacaccctccagtgg

SEQ ID NO: 3754 - DNA, 23 bp, Homo sapiens
cagggtctcacaccttccagagg

SEQ ID NO: 3755 - DNA, 23 bp, Homo sapiens
cagggtctcacacttggcagagg

SEQ ID NO: 3756 - DNA, 23 bp, Homo sapiens
cagggtctcacatcatccagagg

SEQ ID NO: 3757 - DNA, 23 bp, Homo sapiens
cagggtctcacatcctccagagg

SEQ ID NO: 3758 - DNA, 23 bp, Homo sapiens
cagggttcttcaagtcacaaagg

SEQ ID NO: 3759 - DNA, 23 bp, Homo sapiens
caggtcagggctgaggcttgggg

SEQ ID NO: 3760 - DNA, 23 bp, Homo sapiens
caggtcagtgtgatctccacagg

SEQ ID NO: 3761 - DNA, 23 bp, Homo sapiens
caggtcagtgtgatctccccagg

SEQ ID NO: 3762 - DNA, 23 bp, Homo sapiens
caggtcagtgtgatctccgcagg

SEQ ID NO: 3763 - DNA, 23 bp, Homo sapiens
caggtcagtgtgatctccgtagg

SEQ ID NO: 3764 - DNA, 23 bp, Homo sapiens
caggtcagtgtgatctctgcagg

SEQ ID NO: 3765 - DNA, 23 bp, Homo sapiens
caggtgagtgcggggtcgggagg

SEQ ID NO: 3766 - DNA, 23 bp, Homo sapiens
caggtggggtgaagggatgaagg

SEQ ID NO: 3767 - DNA, 23 bp, Homo sapiens
caggtggggtgaaggggtgaagg

SEQ ID NO: 3768 - DNA, 23 bp, Homo sapiens
caggtgtcccgtccattctcagg

SEQ ID NO: 3769 - DNA, 23 bp, Homo sapiens
caggtgtcctgcccattctcagg

SEQ ID NO: 3770 - DNA, 23 bp, Homo sapiens
caggtgtcctgtccattctcagg

SEQ ID NO: 3771 - DNA, 23 bp, Homo sapiens
caggtgtcctgtccgttctcagg

SEQ ID NO: 3772 - DNA, 23 bp, Homo sapiens
caggttctcacaccatccagagg

SEQ ID NO: 3773 - DNA, 23 bp, Homo sapiens
caggttctcacaccctccagagg

SEQ ID NO: 3774 - DNA, 23 bp, Homo sapiens
caggttctcacaccgtccagagg

SEQ ID NO: 3775 - DNA, 23 bp, Homo sapiens
caggttggtcggggcggggcggg

SEQ ID NO: 3776 - DNA, 23 bp, Homo sapiens
cagtcacaagtcacaggggaagg

SEQ ID NO: 3777 - DNA, 23 bp, Homo sapiens
cagtccaccatccccatcgtggg

SEQ ID NO: 3778 - DNA, 23 bp, Homo sapiens
cagtccaccgtccccatcgtggg

SEQ ID NO: 3779 - DNA, 23 bp, Homo sapiens
cagtccctagaatactgatcagg

SEQ ID NO: 3780 - DNA, 23 bp, Homo sapiens
cagtccctaggatagtgatcagg

SEQ ID NO: 3781 - DNA, 23 bp, Homo sapiens
cagtccctggaatactgatcagg

SEQ ID NO: 3782 - DNA, 23 bp, Homo sapiens
cagtgagtgaccccggcccgggg

SEQ ID NO: 3783 - DNA, 23 bp, Homo sapiens
cagtggacacagctgtgctatgg

SEQ ID NO: 3784 - DNA, 23 bp, Homo sapiens
cagtggacacgggggtgggctgg

SEQ ID NO: 3785 - DNA, 23 bp, Homo sapiens
cagtggacgcagctgtgctatgg

SEQ ID NO: 3786 - DNA, 23 bp, Homo sapiens
cagtggagagcctacctggaggg

SEQ ID NO: 3787 - DNA, 23 bp, Homo sapiens
cagtggccctgaccgagacctgg

SEQ ID NO: 3788 - DNA, 23 bp, Homo sapiens
cagtggtcaaagtggtcaaaggg

SEQ ID NO: 3789 - DNA, 23 bp, Homo sapiens
cagttgagagcctacctggaggg

SEQ ID NO: 3790 - DNA, 23 bp, Homo sapiens
cagttgagagcctacctggatgg

SEQ ID NO: 3791 - DNA, 23 bp, Homo sapiens
cataaccagtacgcctacgacgg

SEQ ID NO: 3792 - DNA, 23 bp, Homo sapiens
cataaccagttagcctacgacgg

SEQ ID NO: 3793 - DNA, 23 bp, Homo sapiens
cataaccagttcgcctacgacgg

SEQ ID NO: 3794 - DNA, 23 bp, Homo sapiens
catcctggatactcacgacgcgg

SEQ ID NO: 3795 - DNA, 23 bp, Homo sapiens
catctcagggtgaggggctccgg

SEQ ID NO: 3796 - DNA, 23 bp, Homo sapiens
catctcagggtgaggggctcggg

SEQ ID NO: 3797 - DNA, 23 bp, Homo sapiens
catctcagggtgaggggctctgg

SEQ ID NO: 3798 - DNA, 23 bp, Homo sapiens
catctcagggtgaggggcttcgg

SEQ ID NO: 3799 - DNA, 23 bp, Homo sapiens
catctcagggtgaggggcttggg

SEQ ID NO: 3800 - DNA, 23 bp, Homo sapiens
catctcagggtgaggggctttgg

SEQ ID NO: 3801 - DNA, 23 bp, Homo sapiens
catctctcataggacaccctagg

SEQ ID NO: 3802 - DNA, 23 bp, Homo sapiens
catctctcatggcacaccctagg

SEQ ID NO: 3803 - DNA, 23 bp, Homo sapiens
catctctcatgggacaccctagg

SEQ ID NO: 3804 - DNA, 23 bp, Homo sapiens
catctttcatgggacaccctagg

SEQ ID NO: 3805 - DNA, 23 bp, Homo sapiens
catgaccagtacgcctacgacgg

SEQ ID NO: 3806 - DNA, 23 bp, Homo sapiens
catgaccagtccgcctacgacgg

SEQ ID NO: 3807 - DNA, 23 bp, Homo sapiens
catgaccagttagcctacgacgg

SEQ ID NO: 3808 - DNA, 23 bp, Homo sapiens
catgaccagttcgcctacgacgg

SEQ ID NO: 3809 - DNA, 23 bp, Homo sapiens
catgatggggatggtaggctggg

SEQ ID NO: 3810 - DNA, 23 bp, Homo sapiens
catgatggggatggtgggctggg

SEQ ID NO: 3811 - DNA, 23 bp, Homo sapiens
catgccatgtacagcatgagggg

SEQ ID NO: 3812 - DNA, 23 bp, Homo sapiens
catgctgcttcccagtaatgagg

SEQ ID NO: 3813 - DNA, 23 bp, Homo sapiens
catgggcatcgttgctggcctgg

SEQ ID NO: 3814 - DNA, 23 bp, Homo sapiens
catggtcagagacgagatggtgg

SEQ ID NO: 3815 - DNA, 23 bp, Homo sapiens
catggtcagagacgggatggtgg

SEQ ID NO: 3816 - DNA, 23 bp, Homo sapiens
catggtcagagacggggtggtgg

SEQ ID NO: 3817 - DNA, 23 bp, Homo sapiens
catggtcagagagggggtggtgg

SEQ ID NO: 3818 - DNA, 23 bp, Homo sapiens
catggtcagagatgggatggtgg

SEQ ID NO: 3819 - DNA, 23 bp, Homo sapiens
catggtcagagatggggtggtgg

SEQ ID NO: 3820 - DNA, 23 bp, Homo sapiens
catgtaggcataatgtgaggagg

SEQ ID NO: 3821 - DNA, 23 bp, Homo sapiens
catgtcccggcccggccgcgggg

SEQ ID NO: 3822 - DNA, 23 bp, Homo sapiens
catgtcccggcctggccgcgggg

SEQ ID NO: 3823 - DNA, 23 bp, Homo sapiens
catgtgaccagcctgagaatggg

SEQ ID NO: 3824 - DNA, 23 bp, Homo sapiens
catgtttcctgatcccgccctgg

SEQ ID NO: 3825 - DNA, 23 bp, Homo sapiens
catgtttcctgatcctgccctgg

SEQ ID NO: 3826 - DNA, 23 bp, Homo sapiens
cattctcaggatagtcacatggg

SEQ ID NO: 3827 - DNA, 23 bp, Homo sapiens
cattctcaggatggtcacatggg

SEQ ID NO: 3828 - DNA, 23 bp, Homo sapiens
cattctcaggctggtcacatggg

SEQ ID NO: 3829 - DNA, 23 bp, Homo sapiens
cattggggaggcgcagcattggg

SEQ ID NO: 3830 - DNA, 23 bp, Homo sapiens
cattggggaggcgcagcgttggg

SEQ ID NO: 3831 - DNA, 23 bp, Homo sapiens
cattggggaggcgccgcgttggg

SEQ ID NO: 3832 - DNA, 23 bp, Homo sapiens
catttctggaaacttctctgagg

SEQ ID NO: 3833 - DNA, 23 bp, Homo sapiens
catttctggaaacttctctgggg

SEQ ID NO: 3834 - DNA, 23 bp, Homo sapiens
cattttcctcccctcctcgtggg

SEQ ID NO: 3835 - DNA, 23 bp, Homo sapiens
cattttcctcctcttctcgtggg

SEQ ID NO: 3836 - DNA, 23 bp, Homo sapiens
cattttcctcttcttctcgtggg

SEQ ID NO: 3837 - DNA, 23 bp, Homo sapiens
cattttcctcttcttctcgttgg

SEQ ID NO: 3838 - DNA, 23 bp, Homo sapiens
ccaagcccctcaccctgagatgg

SEQ ID NO: 3839 - DNA, 23 bp, Homo sapiens
ccaagggccgtgtctgcactggg

SEQ ID NO: 3840 - DNA, 23 bp, Homo sapiens
ccaagggccgtgtctgcattggg

SEQ ID NO: 3841 - DNA, 23 bp, Homo sapiens
ccaagttggggatggtgggctgg

SEQ ID NO: 3842 - DNA, 23 bp, Homo sapiens
ccaatccaccgtccccatcgtgg

SEQ ID NO: 3843 - DNA, 23 bp, Homo sapiens
ccaatccatacaccgccttcggg

SEQ ID NO: 3844 - DNA, 23 bp, Homo sapiens
ccaatccatataccgccttcggg

SEQ ID NO: 3845 - DNA, 23 bp, Homo sapiens
ccaattgtctcccctccttgtgg

SEQ ID NO: 3846 - DNA, 23 bp, Homo sapiens
ccacaactgctaggacagccagg

SEQ ID NO: 3847 - DNA, 23 bp, Homo sapiens
ccacaaggaggggagacaattgg

SEQ ID NO: 3848 - DNA, 23 bp, Homo sapiens
ccacaatggggatggtgggctgg

SEQ ID NO: 3849 - DNA, 23 bp, Homo sapiens
ccacagctccaaggacagctagg

SEQ ID NO: 3850 - DNA, 23 bp, Homo sapiens
ccacagctcctaggacagctagg

SEQ ID NO: 3851 - DNA, 23 bp, Homo sapiens
ccaccacagacgcccacttctgg

SEQ ID NO: 3852 - DNA, 23 bp, Homo sapiens
ccaccacagccacccacttctgg

SEQ ID NO: 3853 - DNA, 23 bp, Homo sapiens
ccaccacagccgcccacttctgg

SEQ ID NO: 3854 - DNA, 23 bp, Homo sapiens
ccaccacagctgcccacttctgg

SEQ ID NO: 3855 - DNA, 23 bp, Homo sapiens
ccaccacagctgtccacttctgg

SEQ ID NO: 3856 - DNA, 23 bp, Homo sapiens
ccaccccatctctgaccatgagg

SEQ ID NO: 3857 - DNA, 23 bp, Homo sapiens
ccaccccctctctgaccatgagg

SEQ ID NO: 3858 - DNA, 23 bp, Homo sapiens
ccaccccgtctctgaccatgagg

SEQ ID NO: 3859 - DNA, 23 bp, Homo sapiens
ccacgagaagaagaggaaaatgg

SEQ ID NO: 3860 - DNA, 23 bp, Homo sapiens
ccacgagaagaggaggaaaatgg

SEQ ID NO: 3861 - DNA, 23 bp, Homo sapiens
ccacgaggaggggaggaaaatgg

SEQ ID NO: 3862 - DNA, 23 bp, Homo sapiens
ccacgatggggacggtggactgg

SEQ ID NO: 3863 - DNA, 23 bp, Homo sapiens
ccacgatggggacggtggattgg

SEQ ID NO: 3864 - DNA, 23 bp, Homo sapiens
ccacgatggggacggtgggctgg

SEQ ID NO: 3865 - DNA, 23 bp, Homo sapiens
ccacgatggggatggtggactgg

SEQ ID NO: 3866 - DNA, 23 bp, Homo sapiens
ccacgatggggatggtgggctgg

SEQ ID NO: 3867 - DNA, 23 bp, Homo sapiens
ccacgatgtggacggtgggctgg

SEQ ID NO: 3868 - DNA, 23 bp, Homo sapiens
ccacgctgtctctgaccatgagg

SEQ ID NO: 3869 - DNA, 23 bp, Homo sapiens
ccactcacagactcaccgagtgg

SEQ ID NO: 3870 - DNA, 23 bp, Homo sapiens
ccactcacagactgaccgagtgg

SEQ ID NO: 3871 - DNA, 23 bp, Homo sapiens
ccactcacagattgaccgagtgg

SEQ ID NO: 3872 - DNA, 23 bp, Homo sapiens
ccactcggtcaatctgtgagtgg

SEQ ID NO: 3873 - DNA, 23 bp, Homo sapiens
ccactcggtcagtctgtgactgg

SEQ ID NO: 3874 - DNA, 23 bp, Homo sapiens
ccactcggtcagtctgtgagtgg

SEQ ID NO: 3875 - DNA, 23 bp, Homo sapiens
ccactcggtgagtctgtgagtgg

SEQ ID NO: 3876 - DNA, 23 bp, Homo sapiens
ccactgcagcagctgtggtcagg

SEQ ID NO: 3877 - DNA, 23 bp, Homo sapiens
ccactgccccccagagcagcagg

SEQ ID NO: 3878 - DNA, 23 bp, Homo sapiens
ccactgcggcagctgtggtcagg

SEQ ID NO: 3879 - DNA, 23 bp, Homo sapiens
ccagaaacgatgcccaagttggg

SEQ ID NO: 3880 - DNA, 23 bp, Homo sapiens
ccagaagtggacagctgtggtgg

SEQ ID NO: 3881 - DNA, 23 bp, Homo sapiens
ccagaagtgggcagctgtgatgg

SEQ ID NO: 3882 - DNA, 23 bp, Homo sapiens
ccagaagtgggcagctgtggtgg

SEQ ID NO: 3883 - DNA, 23 bp, Homo sapiens
ccagaagtgggcggctgtggtgg

SEQ ID NO: 3884 - DNA, 23 bp, Homo sapiens
ccagaagtgggcgtctgtggtgg

SEQ ID NO: 3885 - DNA, 23 bp, Homo sapiens
ccagaagtgggtggctgtggtgg

SEQ ID NO: 3886 - DNA, 23 bp, Homo sapiens
ccagacaccagcctggacacagg

SEQ ID NO: 3887 - DNA, 23 bp, Homo sapiens
ccagacaccagcctggacgcagg

SEQ ID NO: 3888 - DNA, 23 bp, Homo sapiens
ccagacgccagcctggacacagg

SEQ ID NO: 3889 - DNA, 23 bp, Homo sapiens
ccagagcccccgagagtagcagg

SEQ ID NO: 3890 - DNA, 23 bp, Homo sapiens
ccagcaacaatgcccacgatggg

SEQ ID NO: 3891 - DNA, 23 bp, Homo sapiens
ccagcaacgatgcccacgatggg

SEQ ID NO: 3892 - DNA, 23 bp, Homo sapiens
ccagcaacgatgcccatgatggg

SEQ ID NO: 3893 - DNA, 23 bp, Homo sapiens
ccagcaaggatgcccacgatggg

SEQ ID NO: 3894 - DNA, 23 bp, Homo sapiens
ccagcaatgatgcccacaatggg

SEQ ID NO: 3895 - DNA, 23 bp, Homo sapiens
ccagcaatgatgcccacgatggg

SEQ ID NO: 3896 - DNA, 23 bp, Homo sapiens
ccagcagtcacaagtcacagggg

SEQ ID NO: 3897 - DNA, 23 bp, Homo sapiens
ccagccagcaacagtgcccaggg

SEQ ID NO: 3898 - DNA, 23 bp, Homo sapiens
ccagccagcgacagtgcccaggg

SEQ ID NO: 3899 - DNA, 23 bp, Homo sapiens
ccagcccaccatccccaacttgg

SEQ ID NO: 3900 - DNA, 23 bp, Homo sapiens
ccagcccaccatccccatcatgg

SEQ ID NO: 3901 - DNA, 23 bp, Homo sapiens
ccagcccaccatccccatcgtgg

SEQ ID NO: 3902 - DNA, 23 bp, Homo sapiens
ccagcccaccatccccattgtgg

SEQ ID NO: 3903 - DNA, 23 bp, Homo sapiens
ccagcccaccgtccacatcgtgg

SEQ ID NO: 3904 - DNA, 23 bp, Homo sapiens
ccagcccaccgtccccatcgtgg

SEQ ID NO: 3905 - DNA, 23 bp, Homo sapiens
ccagccccgaccaacccgcgggg

SEQ ID NO: 3906 - DNA, 23 bp, Homo sapiens
ccagccccgaccaacccgggggg

SEQ ID NO: 3907 - DNA, 23 bp, Homo sapiens
ccagcctaccatccccatcatgg

SEQ ID NO: 3908 - DNA, 23 bp, Homo sapiens
ccagcctggacacaggcacctgg

SEQ ID NO: 3909 - DNA, 23 bp, Homo sapiens
ccagcctggacacagggacctgg

SEQ ID NO: 3910 - DNA, 23 bp, Homo sapiens
ccagcctggacgcaggcacctgg

SEQ ID NO: 3911 - DNA, 23 bp, Homo sapiens
ccaggacagccaggacagccagg

SEQ ID NO: 3912 - DNA, 23 bp, Homo sapiens
ccaggacagccaggacagctggg

SEQ ID NO: 3913 - DNA, 23 bp, Homo sapiens
ccaggacgcctacgacggcaagg

SEQ ID NO: 3914 - DNA, 23 bp, Homo sapiens
ccaggactcccgagagcagcagg

SEQ ID NO: 3915 - DNA, 23 bp, Homo sapiens
ccaggagacacggaatatgaagg

SEQ ID NO: 3916 - DNA, 23 bp, Homo sapiens
ccaggagacacggaatgtgaagg

SEQ ID NO: 3917 - DNA, 23 bp, Homo sapiens
ccaggcagcaacagtgcccaggg

SEQ ID NO: 3918 - DNA, 23 bp, Homo sapiens
ccaggcagcgacagtgcccaggg

SEQ ID NO: 3919 - DNA, 23 bp, Homo sapiens
ccaggcagtgacagtgcccaggg

SEQ ID NO: 3920 - DNA, 23 bp, Homo sapiens
ccaggcctcccgagagcagcagg

SEQ ID NO: 3921 - DNA, 23 bp, Homo sapiens
ccagggcccccaagagtagcagg

SEQ ID NO: 3922 - DNA, 23 bp, Homo sapiens
ccagggccccccagagcagcagg

SEQ ID NO: 3923 - DNA, 23 bp, Homo sapiens
ccagggcccccgagagtagcagg

SEQ ID NO: 3924 - DNA, 23 bp, Homo sapiens
ccagggccgccgagagcagcagg

SEQ ID NO: 3925 - DNA, 23 bp, Homo sapiens
ccagggccgtgtctgcattgggg

SEQ ID NO: 3926 - DNA, 23 bp, Homo sapiens
ccagggccttaaggtcctagagg

SEQ ID NO: 3927 - DNA, 23 bp, Homo sapiens
ccagggctcccgagagcagcagg

SEQ ID NO: 3928 - DNA, 23 bp, Homo sapiens
ccaggtcacccacagtctccggg

SEQ ID NO: 3929 - DNA, 23 bp, Homo sapiens
ccaggtcagggctgaggcttggg

SEQ ID NO: 3930 - DNA, 23 bp, Homo sapiens
ccaggtccctgtgtccaggctgg

SEQ ID NO: 3931 - DNA, 23 bp, Homo sapiens
ccaggtcgcccacagtctccggg

SEQ ID NO: 3932 - DNA, 23 bp, Homo sapiens
ccaggtctcgatcagggccaggg

SEQ ID NO: 3933 - DNA, 23 bp, Homo sapiens
ccaggtctcggtcagggccaggg

SEQ ID NO: 3934 - DNA, 23 bp, Homo sapiens
ccaggtctgggtcagggccaggg

SEQ ID NO: 3935 - DNA, 23 bp, Homo sapiens
ccaggtgcctgcgtccaggctgg

SEQ ID NO: 3936 - DNA, 23 bp, Homo sapiens
ccaggtgcctgtgtccaggctgg

SEQ ID NO: 3937 - DNA, 23 bp, Homo sapiens
ccaggtggcccacagtctccggg

SEQ ID NO: 3938 - DNA, 23 bp, Homo sapiens
ccaggttggtcggggcggggcgg

SEQ ID NO: 3939 - DNA, 23 bp, Homo sapiens
ccagtacgcctacgacggcaagg

SEQ ID NO: 3940 - DNA, 23 bp, Homo sapiens
ccagtcacagactgaccgagtgg

SEQ ID NO: 3941 - DNA, 23 bp, Homo sapiens
ccagtccaccatccccatcgtgg

SEQ ID NO: 3942 - DNA, 23 bp, Homo sapiens
ccagtccaccgtccccatcgtgg

SEQ ID NO: 3943 - DNA, 23 bp, Homo sapiens
ccagtcccccaagccctgcccgg

SEQ ID NO: 3944 - DNA, 23 bp, Homo sapiens
ccagtcccccgagccccgcccgg

SEQ ID NO: 3945 - DNA, 23 bp, Homo sapiens
ccagtcccccgagccccgtccgg

SEQ ID NO: 3946 - DNA, 23 bp, Homo sapiens
ccagtcccgaccaacccgcgggg

SEQ ID NO: 3947 - DNA, 23 bp, Homo sapiens
ccagtccgcctacgacggcaagg

SEQ ID NO: 3948 - DNA, 23 bp, Homo sapiens
ccagtgagtgaccccggcccggg

SEQ ID NO: 3949 - DNA, 23 bp, Homo sapiens
ccagttagcctacgacggcaagg

SEQ ID NO: 3950 - DNA, 23 bp, Homo sapiens
ccagttcgcctacgacggcaagg

SEQ ID NO: 3951 - DNA, 23 bp, Homo sapiens
ccatagctcctaggacagctagg

SEQ ID NO: 3952 - DNA, 23 bp, Homo sapiens
ccatcacagctgcccacttctgg

SEQ ID NO: 3953 - DNA, 23 bp, Homo sapiens
ccatcccatctctgaccatgagg

SEQ ID NO: 3954 - DNA, 23 bp, Homo sapiens
ccatcccccacggacggcccggg

SEQ ID NO: 3955 - DNA, 23 bp, Homo sapiens
ccatcccccacgtacggcccggg

SEQ ID NO: 3956 - DNA, 23 bp, Homo sapiens
ccatcccgtctctgaccatgagg

SEQ ID NO: 3957 - DNA, 23 bp, Homo sapiens
ccatctcagggtgaggggctcgg

SEQ ID NO: 3958 - DNA, 23 bp, Homo sapiens
ccatctcagggtgaggggcttgg

SEQ ID NO: 3959 - DNA, 23 bp, Homo sapiens
ccatctcccgtagatctcccggg

SEQ ID NO: 3960 - DNA, 23 bp, Homo sapiens
ccatctcctatagatctcccggg

SEQ ID NO: 3961 - DNA, 23 bp, Homo sapiens
ccatctcctataggtcgccgggg

SEQ ID NO: 3962 - DNA, 23 bp, Homo sapiens
ccatctcctgtagatctcccggg

SEQ ID NO: 3963 - DNA, 23 bp, Homo sapiens
ccatctcgtctctgaccatgagg

SEQ ID NO: 3964 - DNA, 23 bp, Homo sapiens
ccatctctgcctcaacttcatgg

SEQ ID NO: 3965 - DNA, 23 bp, Homo sapiens
ccatctctgtctcaacttcatgg

SEQ ID NO: 3966 - DNA, 23 bp, Homo sapiens
ccatgaagttgagacagagatgg

SEQ ID NO: 3967 - DNA, 23 bp, Homo sapiens
ccatgaagttgaggcagagatgg

SEQ ID NO: 3968 - DNA, 23 bp, Homo sapiens
ccatgatggggatggtaggctgg

SEQ ID NO: 3969 - DNA, 23 bp, Homo sapiens
ccatgatggggatggtgggctgg

SEQ ID NO: 3970 - DNA, 23 bp, Homo sapiens
ccatgtcccggcccggccgcggg

SEQ ID NO: 3971 - DNA, 23 bp, Homo sapiens
ccatgtcccggcctggccgcggg

SEQ ID NO: 3972 - DNA, 23 bp, Homo sapiens
ccatgtgaccagcctgagaatgg

SEQ ID NO: 3973 - DNA, 23 bp, Homo sapiens
ccatgtgaccatcctgagaacgg

SEQ ID NO: 3974 - DNA, 23 bp, Homo sapiens
ccatgtgaccatcctgagaatgg

SEQ ID NO: 3975 - DNA, 23 bp, Homo sapiens
ccatgtgactatcctgagaatgg

SEQ ID NO: 3976 - DNA, 23 bp, Homo sapiens
ccattctcaggatagtcacatgg

SEQ ID NO: 3977 - DNA, 23 bp, Homo sapiens
ccattctcaggatggtcacatgg

SEQ ID NO: 3978 - DNA, 23 bp, Homo sapiens
ccattctcaggctggtcacatgg

SEQ ID NO: 3979 - DNA, 23 bp, Homo sapiens
ccattttcctcccctcctcgtgg

SEQ ID NO: 3980 - DNA, 23 bp, Homo sapiens
ccattttcctcctcttctcgtgg

SEQ ID NO: 3981 - DNA, 23 bp, Homo sapiens
ccattttcctcttcttctcgtgg

SEQ ID NO: 3982 - DNA, 23 bp, Homo sapiens
cccaacacccaacacacatcagg

SEQ ID NO: 3983 - DNA, 23 bp, Homo sapiens
cccaacacccaacacacattagg

SEQ ID NO: 3984 - DNA, 23 bp, Homo sapiens
cccaacttgggcatcgtttctgg

SEQ ID NO: 3985 - DNA, 23 bp, Homo sapiens
cccaagcctcagccctgacccgg

SEQ ID NO: 3986 - DNA, 23 bp, Homo sapiens
cccaagcctcagccctgacctgg

SEQ ID NO: 3987 - DNA, 23 bp, Homo sapiens
cccaatccatacaccgccttcgg

SEQ ID NO: 3988 - DNA, 23 bp, Homo sapiens
cccaatccatataccgccttcgg

SEQ ID NO: 3989 - DNA, 23 bp, Homo sapiens
cccaatgcagacaaggctctcgg

SEQ ID NO: 3990 - DNA, 23 bp, Homo sapiens
cccaatgcagacacggccctggg

SEQ ID NO: 3991 - DNA, 23 bp, Homo sapiens
cccaatgcagacacggcccttgg

SEQ ID NO: 3992 - DNA, 23 bp, Homo sapiens
cccaatgcagacgcggccctcgg

SEQ ID NO: 3993 - DNA, 23 bp, Homo sapiens
cccaatgggagtgggaaatgggg

SEQ ID NO: 3994 - DNA, 23 bp, Homo sapiens
cccaatgggagtgggaagtgggg

SEQ ID NO: 3995 - DNA, 23 bp, Homo sapiens
cccaatgggagtgggaattgggg

SEQ ID NO: 3996 - DNA, 23 bp, Homo sapiens
cccacacaggcagctgtctcagg

SEQ ID NO: 3997 - DNA, 23 bp, Homo sapiens
cccacagaacatgtggctagagg

SEQ ID NO: 3998 - DNA, 23 bp, Homo sapiens
cccacagaagatgtggctagagg

SEQ ID NO: 3999 - DNA, 23 bp, Homo sapiens
cccacgggcgcctcctccgcggg

SEQ ID NO: 4000 - DNA, 23 bp, Homo sapiens
cccagcagtcacaagtcacaggg

SEQ ID NO: 4001 - DNA, 23 bp, Homo sapiens
cccagccagcaacagtgcccagg

SEQ ID NO: 4002 - DNA, 23 bp, Homo sapiens
cccagccccgaccaacccgcggg

SEQ ID NO: 4003 - DNA, 23 bp, Homo sapiens
cccagccccgaccaacccggggg

SEQ ID NO: 4004 - DNA, 23 bp, Homo sapiens
cccagctgtcctggctgtcctgg

SEQ ID NO: 4005 - DNA, 23 bp, Homo sapiens
cccaggcagcaacagtgcccagg

SEQ ID NO: 4006 - DNA, 23 bp, Homo sapiens
cccaggcagtgacagtgcccagg

SEQ ID NO: 4007 - DNA, 23 bp, Homo sapiens
cccaggccggggtcactcaccgg

SEQ ID NO: 4008 - DNA, 23 bp, Homo sapiens
cccagggccgtgtctgcattggg

SEQ ID NO: 4009 - DNA, 23 bp, Homo sapiens
cccaggtctcgatcagggccagg

SEQ ID NO: 4010 - DNA, 23 bp, Homo sapiens
cccaggtctcggtcagggccagg

SEQ ID NO: 4011 - DNA, 23 bp, Homo sapiens
cccaggtctgggtcagggccagg

SEQ ID NO: 4012 - DNA, 23 bp, Homo sapiens
cccagtcacccacccggactcgg

SEQ ID NO: 4013 - DNA, 23 bp, Homo sapiens
cccagtcccgaccaacccgcggg

SEQ ID NO: 4014 - DNA, 23 bp, Homo sapiens
cccagtgcagacacggcccttgg

SEQ ID NO: 4015 - DNA, 23 bp, Homo sapiens
cccatcatgggcatcgttgctgg

SEQ ID NO: 4016 - DNA, 23 bp, Homo sapiens
cccatcccccacggacggcccgg

SEQ ID NO: 4017 - DNA, 23 bp, Homo sapiens
cccatcccccacgtacggcccgg

SEQ ID NO: 4018 - DNA, 23 bp, Homo sapiens
cccatcgtgggcatcattgctgg

SEQ ID NO: 4019 - DNA, 23 bp, Homo sapiens
cccatcgtgggcatccttgctgg

SEQ ID NO: 4020 - DNA, 23 bp, Homo sapiens
cccatcgtgggcatcgttgctgg

SEQ ID NO: 4021 - DNA, 23 bp, Homo sapiens
cccatcgtgggcattgttgctgg

SEQ ID NO: 4022 - DNA, 23 bp, Homo sapiens
cccatctcccgtagatctcccgg

SEQ ID NO: 4023 - DNA, 23 bp, Homo sapiens
cccatctcctatagatctcccgg

SEQ ID NO: 4024 - DNA, 23 bp, Homo sapiens
cccatctcctataggtcgccggg

SEQ ID NO: 4025 - DNA, 23 bp, Homo sapiens
cccatctcctgtagatctcccgg

SEQ ID NO: 4026 - DNA, 23 bp, Homo sapiens
cccattctccattcaagggaggg

SEQ ID NO: 4027 - DNA, 23 bp, Homo sapiens
cccattgcagacgcggccctcgg

SEQ ID NO: 4028 - DNA, 23 bp, Homo sapiens
cccattgtgggcatcattgctgg

SEQ ID NO: 4029 - DNA, 23 bp, Homo sapiens
ccccaaacacactgagtgtgagg

SEQ ID NO: 4030 - DNA, 23 bp, Homo sapiens
ccccaacaccacaaccaccaagg

SEQ ID NO: 4031 - DNA, 23 bp, Homo sapiens
ccccaacaccacaaccatcaagg

SEQ ID NO: 4032 - DNA, 23 bp, Homo sapiens
ccccaacaccacaaccatcgagg

SEQ ID NO: 4033 - DNA, 23 bp, Homo sapiens
ccccaacaccataatcatcaagg

SEQ ID NO: 4034 - DNA, 23 bp, Homo sapiens
ccccaagagtagcaggaggaggg

SEQ ID NO: 4035 - DNA, 23 bp, Homo sapiens
ccccaatgcagacacggccctgg

SEQ ID NO: 4036 - DNA, 23 bp, Homo sapiens
ccccaattcccactcccattggg

SEQ ID NO: 4037 - DNA, 23 bp, Homo sapiens
ccccacgggcgcctcctccgcgg

SEQ ID NO: 4038 - DNA, 23 bp, Homo sapiens
ccccacttcccactcccattggg

SEQ ID NO: 4039 - DNA, 23 bp, Homo sapiens
ccccagccccgaccaacccgcgg

SEQ ID NO: 4040 - DNA, 23 bp, Homo sapiens
ccccaggctcccaatccatgagg

SEQ ID NO: 4041 - DNA, 23 bp, Homo sapiens
ccccaggctcccactccatgagg

SEQ ID NO: 4042 - DNA, 23 bp, Homo sapiens
ccccaggctctcactccatgagg

SEQ ID NO: 4043 - DNA, 23 bp, Homo sapiens
ccccagtcccgaccaacccgcgg

SEQ ID NO: 4044 - DNA, 23 bp, Homo sapiens
ccccagtctcccactccatgagg

SEQ ID NO: 4045 - DNA, 23 bp, Homo sapiens
ccccatctcctataggtcgccgg

SEQ ID NO: 4046 - DNA, 23 bp, Homo sapiens
ccccatttcccactcccattggg

SEQ ID NO: 4047 - DNA, 23 bp, Homo sapiens
cccccaagagtagcaggaggagg

SEQ ID NO: 4048 - DNA, 23 bp, Homo sapiens
cccccagagcagcaggaggacgg

SEQ ID NO: 4049 - DNA, 23 bp, Homo sapiens
cccccagagcagcaggaggaggg

SEQ ID NO: 4050 - DNA, 23 bp, Homo sapiens
cccccaggttggtcggggcgggg

SEQ ID NO: 4051 - DNA, 23 bp, Homo sapiens
ccccccagagcagcaggaggagg

SEQ ID NO: 4052 - DNA, 23 bp, Homo sapiens
ccccccaggttggtcggggcggg

SEQ ID NO: 4053 - DNA, 23 bp, Homo sapiens
ccccccgggtgggtcggggcggg

SEQ ID NO: 4054 - DNA, 23 bp, Homo sapiens
ccccccgggttggtcggggccgg

SEQ ID NO: 4055 - DNA, 23 bp, Homo sapiens
ccccccgggttggtcggggcggg

SEQ ID NO: 4056 - DNA, 23 bp, Homo sapiens
ccccccgggttggtcggggctgg

SEQ ID NO: 4057 - DNA, 23 bp, Homo sapiens
cccccgagagtagcaggacgagg

SEQ ID NO: 4058 - DNA, 23 bp, Homo sapiens
cccccgagagtagcaggaggagg

SEQ ID NO: 4059 - DNA, 23 bp, Homo sapiens
cccccgggtgggtcggggcgggg

SEQ ID NO: 4060 - DNA, 23 bp, Homo sapiens
cccccgggttggtcggggccggg

SEQ ID NO: 4061 - DNA, 23 bp, Homo sapiens
cccccgggttggtcggggcgggg

SEQ ID NO: 4062 - DNA, 23 bp, Homo sapiens
cccccgggttggtcggggctggg

SEQ ID NO: 4063 - DNA, 23 bp, Homo sapiens
ccccctccttaccccatctcagg

SEQ ID NO: 4064 - DNA, 23 bp, Homo sapiens
ccccctccttactccatctcagg

SEQ ID NO: 4065 - DNA, 23 bp, Homo sapiens
ccccgaccccgcggtcagcccgg

SEQ ID NO: 4066 - DNA, 23 bp, Homo sapiens
ccccgagagtagcaggacgaggg

SEQ ID NO: 4067 - DNA, 23 bp, Homo sapiens
ccccgagagtagcaggaggaggg

SEQ ID NO: 4068 - DNA, 23 bp, Homo sapiens
ccccgcccccgtggtcagcccgg

SEQ ID NO: 4069 - DNA, 23 bp, Homo sapiens
ccccgccccgaccaacccgcggg

SEQ ID NO: 4070 - DNA, 23 bp, Homo sapiens
ccccgccccgaccaacccggggg

SEQ ID NO: 4071 - DNA, 23 bp, Homo sapiens
ccccgccccgaccaacctggggg

SEQ ID NO: 4072 - DNA, 23 bp, Homo sapiens
ccccgccccgacccacccggggg

SEQ ID NO: 4073 - DNA, 23 bp, Homo sapiens
ccccgccccgcccaacccgcggg

SEQ ID NO: 4074 - DNA, 23 bp, Homo sapiens
ccccgccctgaccaacccgcggg

SEQ ID NO: 4075 - DNA, 23 bp, Homo sapiens
ccccgcgggttgggcggggcggg

SEQ ID NO: 4076 - DNA, 23 bp, Homo sapiens
ccccgcgggttggtcagggcggg

SEQ ID NO: 4077 - DNA, 23 bp, Homo sapiens
ccccgcgggttggtcgggactgg

SEQ ID NO: 4078 - DNA, 23 bp, Homo sapiens
ccccgcgggttggtcggggcggg

SEQ ID NO: 4079 - DNA, 23 bp, Homo sapiens
ccccgcgggttggtcggggctgg

SEQ ID NO: 4080 - DNA, 23 bp, Homo sapiens
ccccggccggggtcactcaccgg

SEQ ID NO: 4081 - DNA, 23 bp, Homo sapiens
ccccggcgacctataggagatgg

SEQ ID NO: 4082 - DNA, 23 bp, Homo sapiens
ccccgggcggggtcactcaccgg

SEQ ID NO: 4083 - DNA, 23 bp, Homo sapiens
cccctccttaccccagctcaggg

SEQ ID NO: 4084 - DNA, 23 bp, Homo sapiens
cccctccttaccccatctcaggg

SEQ ID NO: 4085 - DNA, 23 bp, Homo sapiens
cccctccttactccatctcaggg

SEQ ID NO: 4086 - DNA, 23 bp, Homo sapiens
cccctcgctcctccccacagagg

SEQ ID NO: 4087 - DNA, 23 bp, Homo sapiens
cccctcgctcctcccggcagagg

SEQ ID NO: 4088 - DNA, 23 bp, Homo sapiens
cccctcgctcctctccccagagg

SEQ ID NO: 4089 - DNA, 23 bp, Homo sapiens
cccctcgctcctctccgcagagg

SEQ ID NO: 4090 - DNA, 23 bp, Homo sapiens
cccctctctcctccccacagagg

SEQ ID NO: 4091 - DNA, 23 bp, Homo sapiens
cccctgtgacttgtgactgctgg

SEQ ID NO: 4092 - DNA, 23 bp, Homo sapiens
ccccttgctcctccctacagagg

SEQ ID NO: 4093 - DNA, 23 bp, Homo sapiens
ccccttgcttctccccacagagg

SEQ ID NO: 4094 - DNA, 23 bp, Homo sapiens
ccccttgcttctccccgcagagg

SEQ ID NO: 4095 - DNA, 23 bp, Homo sapiens
cccgaaggcggtatatggattgg

SEQ ID NO: 4096 - DNA, 23 bp, Homo sapiens
cccgaaggcggtgtatggattgg

SEQ ID NO: 4097 - DNA, 23 bp, Homo sapiens
cccgacgggcgcctcctccgcgg

SEQ ID NO: 4098 - DNA, 23 bp, Homo sapiens
cccgacgggcgcttcctccgcgg

SEQ ID NO: 4099 - DNA, 23 bp, Homo sapiens
cccgccccgaccaacccgcgggg

SEQ ID NO: 4100 - DNA, 23 bp, Homo sapiens
cccgccccgaccaacccgggggg

SEQ ID NO: 4101 - DNA, 23 bp, Homo sapiens
cccgccccgaccaacctgggggg

SEQ ID NO: 4102 - DNA, 23 bp, Homo sapiens
cccgccccgacccacccgggggg

SEQ ID NO: 4103 - DNA, 23 bp, Homo sapiens
cccgccccgcccaacccgcgggg

SEQ ID NO: 4104 - DNA, 23 bp, Homo sapiens
cccgccctgaccaacccgcgggg

SEQ ID NO: 4105 - DNA, 23 bp, Homo sapiens
cccgcggaggaagcgcccgtcgg

SEQ ID NO: 4106 - DNA, 23 bp, Homo sapiens
cccgcggaggaggcgcccgtcgg

SEQ ID NO: 4107 - DNA, 23 bp, Homo sapiens
cccgcggaggaggcgcccgtggg

SEQ ID NO: 4108 - DNA, 23 bp, Homo sapiens
cccgcggccaggccgggacatgg

SEQ ID NO: 4109 - DNA, 23 bp, Homo sapiens
cccgcggccgggccaggacacgg

SEQ ID NO: 4110 - DNA, 23 bp, Homo sapiens
cccgcggccgggccgggacacgg

SEQ ID NO: 4111 - DNA, 23 bp, Homo sapiens
cccgcggccgggccgggacatgg

SEQ ID NO: 4112 - DNA, 23 bp, Homo sapiens
cccgcgggttgggcggggcgggg

SEQ ID NO: 4113 - DNA, 23 bp, Homo sapiens
cccgcgggttggtcagggcgggg

SEQ ID NO: 4114 - DNA, 23 bp, Homo sapiens
cccgcgggttggtcgggactggg

SEQ ID NO: 4115 - DNA, 23 bp, Homo sapiens
cccgcgggttggtcggggcgggg

SEQ ID NO: 4116 - DNA, 23 bp, Homo sapiens
cccgcgggttggtcggggctggg

SEQ ID NO: 4117 - DNA, 23 bp, Homo sapiens
cccggaccccgaggtcagcccgg

SEQ ID NO: 4118 - DNA, 23 bp, Homo sapiens
cccggaccccgcggtcagcccgg

SEQ ID NO: 4119 - DNA, 23 bp, Homo sapiens
cccggagactcggggcgacccgg

SEQ ID NO: 4120 - DNA, 23 bp, Homo sapiens
cccggagactgtgggccacctgg

SEQ ID NO: 4121 - DNA, 23 bp, Homo sapiens
cccggagactgtgggcgacccgg

SEQ ID NO: 4122 - DNA, 23 bp, Homo sapiens
cccggagactgtgggcgacctgg

SEQ ID NO: 4123 - DNA, 23 bp, Homo sapiens
cccggagactgtgggtgacctgg

SEQ ID NO: 4124 - DNA, 23 bp, Homo sapiens
cccggccccgaccaacccggggg

SEQ ID NO: 4125 - DNA, 23 bp, Homo sapiens
cccggccgggggcgcaggtcagg

SEQ ID NO: 4126 - DNA, 23 bp, Homo sapiens
cccggcgacctataggagatggg

SEQ ID NO: 4127 - DNA, 23 bp, Homo sapiens
cccggcgagggcgcaggacccgg

SEQ ID NO: 4128 - DNA, 23 bp, Homo sapiens
cccggcggggacgcaggacccgg

SEQ ID NO: 4129 - DNA, 23 bp, Homo sapiens
cccggcgggggcgcaggacccgg

SEQ ID NO: 4130 - DNA, 23 bp, Homo sapiens
cccggctgaagggctccagaagg

SEQ ID NO: 4131 - DNA, 23 bp, Homo sapiens
cccgggagatctacaggagatgg

SEQ ID NO: 4132 - DNA, 23 bp, Homo sapiens
cccgggagatctacgggagatgg

SEQ ID NO: 4133 - DNA, 23 bp, Homo sapiens
cccgggagatctataggagatgg

SEQ ID NO: 4134 - DNA, 23 bp, Homo sapiens
cccgggccggggtcactcaccgg

SEQ ID NO: 4135 - DNA, 23 bp, Homo sapiens
cccgggccggggtcactcactgg

SEQ ID NO: 4136 - DNA, 23 bp, Homo sapiens
cccgggccgtacgtgggggatgg

SEQ ID NO: 4137 - DNA, 23 bp, Homo sapiens
cccgggccgtccgtgggggatgg

SEQ ID NO: 4138 - DNA, 23 bp, Homo sapiens
cccgggctggggtcactcaccgg

SEQ ID NO: 4139 - DNA, 23 bp, Homo sapiens
cccgggtcctgcgcccccgccgg

SEQ ID NO: 4140 - DNA, 23 bp, Homo sapiens
cccgggtcctgcgccctcgccgg

SEQ ID NO: 4141 - DNA, 23 bp, Homo sapiens
cccgggtcctgcgtccccgccgg

SEQ ID NO: 4142 - DNA, 23 bp, Homo sapiens
cccgggtcgccccgagtctccgg

SEQ ID NO: 4143 - DNA, 23 bp, Homo sapiens
cccggtcctgcgcccccgccagg

SEQ ID NO: 4144 - DNA, 23 bp, Homo sapiens
cccggtttcattttcagttgagg

SEQ ID NO: 4145 - DNA, 23 bp, Homo sapiens
cccggtttcattttcagtttagg

SEQ ID NO: 4146 - DNA, 23 bp, Homo sapiens
cccggtttcattttcggtttagg

SEQ ID NO: 4147 - DNA, 23 bp, Homo sapiens
cccgtctgagatccaccccaagg

SEQ ID NO: 4148 - DNA, 23 bp, Homo sapiens
cccgtctgagatccaccccgagg

SEQ ID NO: 4149 - DNA, 23 bp, Homo sapiens
cccgttgcttctccccacagagg

SEQ ID NO: 4150 - DNA, 23 bp, Homo sapiens
ccctccccatcccccacggacgg

SEQ ID NO: 4151 - DNA, 23 bp, Homo sapiens
ccctcccgacccgcactcaccgg

SEQ ID NO: 4152 - DNA, 23 bp, Homo sapiens
ccctcccttgaatggagaatggg

SEQ ID NO: 4153 - DNA, 23 bp, Homo sapiens
ccctcctcatcccccacggacgg

SEQ ID NO: 4154 - DNA, 23 bp, Homo sapiens
ccctcctcctgctactctcgggg

SEQ ID NO: 4155 - DNA, 23 bp, Homo sapiens
ccctcctcctgctactcttgggg

SEQ ID NO: 4156 - DNA, 23 bp, Homo sapiens
ccctcctcctgctgctctggggg

SEQ ID NO: 4157 - DNA, 23 bp, Homo sapiens
ccctcctgagatctgtcgtcagg

SEQ ID NO: 4158 - DNA, 23 bp, Homo sapiens
ccctcctgaggtctgtcctcagg

SEQ ID NO: 4159 - DNA, 23 bp, Homo sapiens
ccctcgtcctgctactctcgggg

SEQ ID NO: 4160 - DNA, 23 bp, Homo sapiens
ccctgacgacagatctcaggagg

SEQ ID NO: 4161 - DNA, 23 bp, Homo sapiens
ccctgactttgtttctgcaaagg

SEQ ID NO: 4162 - DNA, 23 bp, Homo sapiens
ccctgagatggagtaaggagggg

SEQ ID NO: 4163 - DNA, 23 bp, Homo sapiens
ccctgagatggggtaaggagggg

SEQ ID NO: 4164 - DNA, 23 bp, Homo sapiens
ccctgagctggggtaaggagggg

SEQ ID NO: 4165 - DNA, 23 bp, Homo sapiens
ccctgaggacagacctcaggagg

SEQ ID NO: 4166 - DNA, 23 bp, Homo sapiens
ccctgccgacccgcactcaccgg

SEQ ID NO: 4167 - DNA, 23 bp, Homo sapiens
ccctgctaaggacagaccttagg

SEQ ID NO: 4168 - DNA, 23 bp, Homo sapiens
ccctgctgaagggctccagaagg

SEQ ID NO: 4169 - DNA, 23 bp, Homo sapiens
ccctggccctgacccagaccagg

SEQ ID NO: 4170 - DNA, 23 bp, Homo sapiens
ccctggccctgacccagacctgg

SEQ ID NO: 4171 - DNA, 23 bp, Homo sapiens
ccctggccctgaccgagacctgg

SEQ ID NO: 4172 - DNA, 23 bp, Homo sapiens
ccctggccctgatcgagacctgg

SEQ ID NO: 4173 - DNA, 23 bp, Homo sapiens
ccctgggcactgtcactgcctgg

SEQ ID NO: 4174 - DNA, 23 bp, Homo sapiens
ccctgggcactgtcgctgcctgg

SEQ ID NO: 4175 - DNA, 23 bp, Homo sapiens
ccctgggcactgtcgctggctgg

SEQ ID NO: 4176 - DNA, 23 bp, Homo sapiens
ccctgggcactgttgctgcctgg

SEQ ID NO: 4177 - DNA, 23 bp, Homo sapiens
ccctgggcactgttgctggctgg

SEQ ID NO: 4178 - DNA, 23 bp, Homo sapiens
ccctggtctgggtcagggccagg

SEQ ID NO: 4179 - DNA, 23 bp, Homo sapiens
ccctgtgacttgtgactgctggg

SEQ ID NO: 4180 - DNA, 23 bp, Homo sapiens
cccttctggagcccttcagcagg

SEQ ID NO: 4181 - DNA, 23 bp, Homo sapiens
ccgaaaatgaaaccgggtaaagg

SEQ ID NO: 4182 - DNA, 23 bp, Homo sapiens
ccgaaggcggtatatggattggg

SEQ ID NO: 4183 - DNA, 23 bp, Homo sapiens
ccgaaggcggtgtatggattggg

SEQ ID NO: 4184 - DNA, 23 bp, Homo sapiens
ccgacgggcgcctcctccgcggg

SEQ ID NO: 4185 - DNA, 23 bp, Homo sapiens
ccgacgggcgcttcctccgcggg

SEQ ID NO: 4186 - DNA, 23 bp, Homo sapiens
ccgagagccttgtctgcattggg

SEQ ID NO: 4187 - DNA, 23 bp, Homo sapiens
ccgagcccctcaccctgagatgg

SEQ ID NO: 4188 - DNA, 23 bp, Homo sapiens
ccgagggccgcgtctgcaatggg

SEQ ID NO: 4189 - DNA, 23 bp, Homo sapiens
ccgagggccgcgtctgcattggg

SEQ ID NO: 4190 - DNA, 23 bp, Homo sapiens
ccgagtccgggtgggtgactggg

SEQ ID NO: 4191 - DNA, 23 bp, Homo sapiens
ccgcagcggtccaggagcgcagg

SEQ ID NO: 4192 - DNA, 23 bp, Homo sapiens
ccgcccagccccgaccaacccgg

SEQ ID NO: 4193 - DNA, 23 bp, Homo sapiens
ccgccccgccccgaccaacccgg

SEQ ID NO: 4194 - DNA, 23 bp, Homo sapiens
ccgccccgccccgaccaacctgg

SEQ ID NO: 4195 - DNA, 23 bp, Homo sapiens
ccgccccgccccgacccacccgg

SEQ ID NO: 4196 - DNA, 23 bp, Homo sapiens
ccgcccggccccgaccaacccgg

SEQ ID NO: 4197 - DNA, 23 bp, Homo sapiens
ccgccctcctgaaggtcctcagg

SEQ ID NO: 4198 - DNA, 23 bp, Homo sapiens
ccgccgcggtccaagagcgcagg

SEQ ID NO: 4199 - DNA, 23 bp, Homo sapiens
ccgccgcggtccaggagcgcagg

SEQ ID NO: 4200 - DNA, 23 bp, Homo sapiens
ccgccgcggtccaggagctcagg

SEQ ID NO: 4201 - DNA, 23 bp, Homo sapiens
ccgcggaggaagcgcccgtccgg

SEQ ID NO: 4202 - DNA, 23 bp, Homo sapiens
ccgcggaggaagcgcccgtcggg

SEQ ID NO: 4203 - DNA, 23 bp, Homo sapiens
ccgcggaggaggcgcccgtccgg

SEQ ID NO: 4204 - DNA, 23 bp, Homo sapiens
ccgcggaggaggcgcccgtcggg

SEQ ID NO: 4205 - DNA, 23 bp, Homo sapiens
ccgcggaggaggcgcccgtgggg

SEQ ID NO: 4206 - DNA, 23 bp, Homo sapiens
ccgcggcagtccaggagcgcagg

SEQ ID NO: 4207 - DNA, 23 bp, Homo sapiens
ccgcggcggtccaggagcgcagg

SEQ ID NO: 4208 - DNA, 23 bp, Homo sapiens
ccgcggcggtccaggagctcagg

SEQ ID NO: 4209 - DNA, 23 bp, Homo sapiens
ccgcgggttggtcgggactgggg

SEQ ID NO: 4210 - DNA, 23 bp, Homo sapiens
ccgcgggttggtcggggctgggg

SEQ ID NO: 4211 - DNA, 23 bp, Homo sapiens
ccgctactacaaccagagcgagg

SEQ ID NO: 4212 - DNA, 23 bp, Homo sapiens
ccggaacacacagatctacaagg

SEQ ID NO: 4213 - DNA, 23 bp, Homo sapiens
ccggaacacacggaaagtgaagg

SEQ ID NO: 4214 - DNA, 23 bp, Homo sapiens
ccggaacacacggaatgtgaagg

SEQ ID NO: 4215 - DNA, 23 bp, Homo sapiens
ccggacgggcgcctcctccgcgg

SEQ ID NO: 4216 - DNA, 23 bp, Homo sapiens
ccggacgggcgcttcctccgcgg

SEQ ID NO: 4217 - DNA, 23 bp, Homo sapiens
ccggacggggctcgggggactgg

SEQ ID NO: 4218 - DNA, 23 bp, Homo sapiens
ccggagactcggggcgacccggg

SEQ ID NO: 4219 - DNA, 23 bp, Homo sapiens
ccggccccgaccaacccgggggg

SEQ ID NO: 4220 - DNA, 23 bp, Homo sapiens
ccggcgacctataggagatgggg

SEQ ID NO: 4221 - DNA, 23 bp, Homo sapiens
ccggcgagggcgcaggacccggg

SEQ ID NO: 4222 - DNA, 23 bp, Homo sapiens
ccggcggggacgcaggacccggg

SEQ ID NO: 4223 - DNA, 23 bp, Homo sapiens
ccggcgggggcgcaggacccggg

SEQ ID NO: 4224 - DNA, 23 bp, Homo sapiens
ccgggagacacagatctgcaagg

SEQ ID NO: 4225 - DNA, 23 bp, Homo sapiens
ccgggagacacggaacatgaagg

SEQ ID NO: 4226 - DNA, 23 bp, Homo sapiens
ccgggagactcggggcgacccgg

SEQ ID NO: 4227 - DNA, 23 bp, Homo sapiens
ccgggagacttggggcgacccgg

SEQ ID NO: 4228 - DNA, 23 bp, Homo sapiens
ccgggagatctacaggagatagg

SEQ ID NO: 4229 - DNA, 23 bp, Homo sapiens
ccgggagatctacaggagatggg

SEQ ID NO: 4230 - DNA, 23 bp, Homo sapiens
ccgggagatctacgggagatggg

SEQ ID NO: 4231 - DNA, 23 bp, Homo sapiens
ccgggagatctataggagatggg

SEQ ID NO: 4232 - DNA, 23 bp, Homo sapiens
ccgggcagggcttgggggactgg

SEQ ID NO: 4233 - DNA, 23 bp, Homo sapiens
ccgggccgtacgtgggggatggg

SEQ ID NO: 4234 - DNA, 23 bp, Homo sapiens
ccgggccgtccgtgggggatggg

SEQ ID NO: 4235 - DNA, 23 bp, Homo sapiens
ccgggcgccatggatagagcagg

SEQ ID NO: 4236 - DNA, 23 bp, Homo sapiens
ccgggcgccgtggatagagcagg

SEQ ID NO: 4237 - DNA, 23 bp, Homo sapiens
ccgggcgccgtgggtggagcagg

SEQ ID NO: 4238 - DNA, 23 bp, Homo sapiens
ccgggcggggctcgggggactgg

SEQ ID NO: 4239 - DNA, 23 bp, Homo sapiens
ccgggctgaccacgggggcgggg

SEQ ID NO: 4240 - DNA, 23 bp, Homo sapiens
ccgggctgaccgcggggtccggg

SEQ ID NO: 4241 - DNA, 23 bp, Homo sapiens
ccgggctgaccgcggggtcgggg

SEQ ID NO: 4242 - DNA, 23 bp, Homo sapiens
ccgggctgacctcggggtccggg

SEQ ID NO: 4243 - DNA, 23 bp, Homo sapiens
ccgggtcagggctgaggcttggg

SEQ ID NO: 4244 - DNA, 23 bp, Homo sapiens
ccgggtcctgcgcccccgccagg

SEQ ID NO: 4245 - DNA, 23 bp, Homo sapiens
ccgggtcctgcgcccccgccggg

SEQ ID NO: 4246 - DNA, 23 bp, Homo sapiens
ccgggtcctgcgccctcgccggg

SEQ ID NO: 4247 - DNA, 23 bp, Homo sapiens
ccgggtcctgcgtccccgccggg

SEQ ID NO: 4248 - DNA, 23 bp, Homo sapiens
ccgggtcgcccacagtctccggg

SEQ ID NO: 4249 - DNA, 23 bp, Homo sapiens
ccgggtcgccccaagtctcccgg

SEQ ID NO: 4250 - DNA, 23 bp, Homo sapiens
ccgggtcgccccgagtctcccgg

SEQ ID NO: 4251 - DNA, 23 bp, Homo sapiens
ccgggtcgccccgagtctccggg

SEQ ID NO: 4252 - DNA, 23 bp, Homo sapiens
ccgggtcttgcgcccccgccagg

SEQ ID NO: 4253 - DNA, 23 bp, Homo sapiens
ccgggtgggtcggggcggggcgg

SEQ ID NO: 4254 - DNA, 23 bp, Homo sapiens
ccgggttggtcggggccggacgg

SEQ ID NO: 4255 - DNA, 23 bp, Homo sapiens
ccgggttggtcggggccgggcgg

SEQ ID NO: 4256 - DNA, 23 bp, Homo sapiens
ccgggttggtcggggcggggcgg

SEQ ID NO: 4257 - DNA, 23 bp, Homo sapiens
ccgggttggtcggggctgggcgg

SEQ ID NO: 4258 - DNA, 23 bp, Homo sapiens
ccggtctgagatccaccccgagg

SEQ ID NO: 4259 - DNA, 23 bp, Homo sapiens
ccggtctgagatcctccccgagg

SEQ ID NO: 4260 - DNA, 23 bp, Homo sapiens
ccggtgagtgaccccagcccggg

SEQ ID NO: 4261 - DNA, 23 bp, Homo sapiens
ccggtgagtgaccccgcccgggg

SEQ ID NO: 4262 - DNA, 23 bp, Homo sapiens
ccggtgagtgaccccggcccggg

SEQ ID NO: 4263 - DNA, 23 bp, Homo sapiens
ccggtgagtgaccccggccgggg

SEQ ID NO: 4264 - DNA, 23 bp, Homo sapiens
ccggtgagtgaccccggcctggg

SEQ ID NO: 4265 - DNA, 23 bp, Homo sapiens
ccggtgagtgcgggatcgggagg

SEQ ID NO: 4266 - DNA, 23 bp, Homo sapiens
ccggtgagtgcggggtcggcagg

SEQ ID NO: 4267 - DNA, 23 bp, Homo sapiens
ccggtgagtgcggggtcgggagg

SEQ ID NO: 4268 - DNA, 23 bp, Homo sapiens
ccggtgagtgcggggttgggagg

SEQ ID NO: 4269 - DNA, 23 bp, Homo sapiens
ccggtgagtgcgggtcggcaggg

SEQ ID NO: 4270 - DNA, 23 bp, Homo sapiens
ccggtgagtgcgggtcgggaggg

SEQ ID NO: 4271 - DNA, 23 bp, Homo sapiens
ccgtccggccccgaccaacccgg

SEQ ID NO: 4272 - DNA, 23 bp, Homo sapiens
ccgtccgtgggggatgaggaggg

SEQ ID NO: 4273 - DNA, 23 bp, Homo sapiens
ccgtccgtgggggatggggaggg

SEQ ID NO: 4274 - DNA, 23 bp, Homo sapiens
ccgtcctcctgctgctctggggg

SEQ ID NO: 4275 - DNA, 23 bp, Homo sapiens
ccgtgtcccggcccggccgcggg

SEQ ID NO: 4276 - DNA, 23 bp, Homo sapiens
ccgtgtcctggcccggccgcggg

SEQ ID NO: 4277 - DNA, 23 bp, Homo sapiens
ccgttctcaggatggtcacatgg

SEQ ID NO: 4278 - DNA, 23 bp, Homo sapiens
cctaaaccgaaaatgaaaccggg

SEQ ID NO: 4279 - DNA, 23 bp, Homo sapiens
cctaaactgaaaatgaaaccggg

SEQ ID NO: 4280 - DNA, 23 bp, Homo sapiens
cctaaggtctgtccttagcaggg

SEQ ID NO: 4281 - DNA, 23 bp, Homo sapiens
cctaatgtgtgttgggtgttggg

SEQ ID NO: 4282 - DNA, 23 bp, Homo sapiens
cctagctgtcctaggagctatgg

SEQ ID NO: 4283 - DNA, 23 bp, Homo sapiens
cctagctgtcctaggagctgtgg

SEQ ID NO: 4284 - DNA, 23 bp, Homo sapiens
cctagctgtccttggagctgtgg

SEQ ID NO: 4285 - DNA, 23 bp, Homo sapiens
cctatctcctgtagatctcccgg

SEQ ID NO: 4286 - DNA, 23 bp, Homo sapiens
cctatgaggggactgggaggagg

SEQ ID NO: 4287 - DNA, 23 bp, Homo sapiens
cctcaactgaaaatgaaaccggg

SEQ ID NO: 4288 - DNA, 23 bp, Homo sapiens
cctcacaagacagctgtctcagg

SEQ ID NO: 4289 - DNA, 23 bp, Homo sapiens
cctcacactcagtgtgtttgggg

SEQ ID NO: 4290 - DNA, 23 bp, Homo sapiens
cctcaccctgagatggagtaagg

SEQ ID NO: 4291 - DNA, 23 bp, Homo sapiens
cctcaccctgagatggggtaagg

SEQ ID NO: 4292 - DNA, 23 bp, Homo sapiens
cctcaccctgagctggggtaagg

SEQ ID NO: 4293 - DNA, 23 bp, Homo sapiens
cctcagcctccactcaggtcagg

SEQ ID NO: 4294 - DNA, 23 bp, Homo sapiens
cctcatggagtgagagcctgggg

SEQ ID NO: 4295 - DNA, 23 bp, Homo sapiens
cctcatggagtgggagactgggg

SEQ ID NO: 4296 - DNA, 23 bp, Homo sapiens
cctcatggagtgggagcctgggg

SEQ ID NO: 4297 - DNA, 23 bp, Homo sapiens
cctcatggattgggagcctgggg

SEQ ID NO: 4298 - DNA, 23 bp, Homo sapiens
cctcatggtcagagacagcgtgg

SEQ ID NO: 4299 - DNA, 23 bp, Homo sapiens
cctcatggtcagagacgagatgg

SEQ ID NO: 4300 - DNA, 23 bp, Homo sapiens
cctcatggtcagagacgggatgg

SEQ ID NO: 4301 - DNA, 23 bp, Homo sapiens
cctcatggtcagagacggggtgg

SEQ ID NO: 4302 - DNA, 23 bp, Homo sapiens
cctcatggtcagagagggggtgg

SEQ ID NO: 4303 - DNA, 23 bp, Homo sapiens
cctcatggtcagagatgggatgg

SEQ ID NO: 4304 - DNA, 23 bp, Homo sapiens
cctcatggtcagagatggggtgg

SEQ ID NO: 4305 - DNA, 23 bp, Homo sapiens
cctcccaaccccgcactcacagg

SEQ ID NO: 4306 - DNA, 23 bp, Homo sapiens
cctcccaaccccgcactcaccgg

SEQ ID NO: 4307 - DNA, 23 bp, Homo sapiens
cctcccaacctcgcactcacagg

SEQ ID NO: 4308 - DNA, 23 bp, Homo sapiens
cctcccgaccccgcactcaccgg

SEQ ID NO: 4309 - DNA, 23 bp, Homo sapiens
cctcccgatcccgcactcaccgg

SEQ ID NO: 4310 - DNA, 23 bp, Homo sapiens
cctcctaaccccgcactcacagg

SEQ ID NO: 4311 - DNA, 23 bp, Homo sapiens
cctcctcacattaggctaacagg

SEQ ID NO: 4312 - DNA, 23 bp, Homo sapiens
cctcctcacattatgctaacagg

SEQ ID NO: 4313 - DNA, 23 bp, Homo sapiens
cctcctcccagtcccctcatagg

SEQ ID NO: 4314 - DNA, 23 bp, Homo sapiens
cctcctccctgtcccctcacagg

SEQ ID NO: 4315 - DNA, 23 bp, Homo sapiens
cctcctccgcgggtaccaccagg

SEQ ID NO: 4316 - DNA, 23 bp, Homo sapiens
cctcctccgcgggtaccagcagg

SEQ ID NO: 4317 - DNA, 23 bp, Homo sapiens
cctcctccgcgggtatgaccagg

SEQ ID NO: 4318 - DNA, 23 bp, Homo sapiens
cctcctcctgctactctcggggg

SEQ ID NO: 4319 - DNA, 23 bp, Homo sapiens
cctcctcctgctactcttggggg

SEQ ID NO: 4320 - DNA, 23 bp, Homo sapiens
cctcctcctgctgctctgggggg

SEQ ID NO: 4321 - DNA, 23 bp, Homo sapiens
cctcctgagatctgtcgtcaggg

SEQ ID NO: 4322 - DNA, 23 bp, Homo sapiens
cctcctgaggtctgtcctcaggg

SEQ ID NO: 4323 - DNA, 23 bp, Homo sapiens
cctcgaccggcgagagccccagg

SEQ ID NO: 4324 - DNA, 23 bp, Homo sapiens
cctcgatggttgtggtgttgggg

SEQ ID NO: 4325 - DNA, 23 bp, Homo sapiens
cctcgctctggttgtagtagcgg

SEQ ID NO: 4326 - DNA, 23 bp, Homo sapiens
cctcggggaggatctcagaccgg

SEQ ID NO: 4327 - DNA, 23 bp, Homo sapiens
cctcggggtggatctcagaccgg

SEQ ID NO: 4328 - DNA, 23 bp, Homo sapiens
cctcggggtggatctcagacggg

SEQ ID NO: 4329 - DNA, 23 bp, Homo sapiens
cctcgtcctgctactctcggggg

SEQ ID NO: 4330 - DNA, 23 bp, Homo sapiens
cctctagccacatcttctgtggg

SEQ ID NO: 4331 - DNA, 23 bp, Homo sapiens
cctctagccacatgttctgtggg

SEQ ID NO: 4332 - DNA, 23 bp, Homo sapiens
cctctaggaccttaaggccctgg

SEQ ID NO: 4333 - DNA, 23 bp, Homo sapiens
cctctctggagacctttagcagg

SEQ ID NO: 4334 - DNA, 23 bp, Homo sapiens
cctctgccgggaggagcgagggg

SEQ ID NO: 4335 - DNA, 23 bp, Homo sapiens
cctctgcggagaggagcgagggg

SEQ ID NO: 4336 - DNA, 23 bp, Homo sapiens
cctctgcggggagaagcaagggg

SEQ ID NO: 4337 - DNA, 23 bp, Homo sapiens
cctctggggagaggagcgagggg

SEQ ID NO: 4338 - DNA, 23 bp, Homo sapiens
cctctgtagggaggagcaagggg

SEQ ID NO: 4339 - DNA, 23 bp, Homo sapiens
cctctgtggggagaagcaacggg

SEQ ID NO: 4340 - DNA, 23 bp, Homo sapiens
cctctgtggggagaagcaagggg

SEQ ID NO: 4341 - DNA, 23 bp, Homo sapiens
cctctgtggggaggagagagggg

SEQ ID NO: 4342 - DNA, 23 bp, Homo sapiens
cctctgtggggaggagcgagggg

SEQ ID NO: 4343 - DNA, 23 bp, Homo sapiens
cctgaccacagctgccgcagtgg

SEQ ID NO: 4344 - DNA, 23 bp, Homo sapiens
cctgaccacagctgctgcagtgg

SEQ ID NO: 4345 - DNA, 23 bp, Homo sapiens
cctgacctgagtggaggctgagg

SEQ ID NO: 4346 - DNA, 23 bp, Homo sapiens
cctgacctgcgcccccggccggg

SEQ ID NO: 4347 - DNA, 23 bp, Homo sapiens
cctgacgacagatctcaggaggg

SEQ ID NO: 4348 - DNA, 23 bp, Homo sapiens
cctgagacagctgcctgtgtggg

SEQ ID NO: 4349 - DNA, 23 bp, Homo sapiens
cctgagacagctgtcttgtgagg

SEQ ID NO: 4350 - DNA, 23 bp, Homo sapiens
cctgagatggagtaaggaggggg

SEQ ID NO: 4351 - DNA, 23 bp, Homo sapiens
cctgagatggggtaaggaggggg

SEQ ID NO: 4352 - DNA, 23 bp, Homo sapiens
cctgagctcctggaccgccgcgg

SEQ ID NO: 4353 - DNA, 23 bp, Homo sapiens
cctgagctcctggaccgcggcgg

SEQ ID NO: 4354 - DNA, 23 bp, Homo sapiens
cctgaggacagacctcaggaggg

SEQ ID NO: 4355 - DNA, 23 bp, Homo sapiens
cctgaggaccttcaggagggcgg

SEQ ID NO: 4356 - DNA, 23 bp, Homo sapiens
cctgatgtgtgttgggtgttggg

SEQ ID NO: 4357 - DNA, 23 bp, Homo sapiens
cctgcagacacggaatgtgaagg

SEQ ID NO: 4358 - DNA, 23 bp, Homo sapiens
cctgcatctcagtcccacacagg

SEQ ID NO: 4359 - DNA, 23 bp, Homo sapiens
cctgccgaccccgcactcaccgg

SEQ ID NO: 4360 - DNA, 23 bp, Homo sapiens
cctgcgctcctggaccgccgcgg

SEQ ID NO: 4361 - DNA, 23 bp, Homo sapiens
cctgcgctcctggaccgcggcgg

SEQ ID NO: 4362 - DNA, 23 bp, Homo sapiens
cctgcgctcctggaccgctgcgg

SEQ ID NO: 4363 - DNA, 23 bp, Homo sapiens
cctgcgctcctggactgccgcgg

SEQ ID NO: 4364 - DNA, 23 bp, Homo sapiens
cctgcgctcttggaccgcggcgg

SEQ ID NO: 4365 - DNA, 23 bp, Homo sapiens
cctgcgtccaggctggtgtctgg

SEQ ID NO: 4366 - DNA, 23 bp, Homo sapiens
cctgctaaaggtctccagagagg

SEQ ID NO: 4367 - DNA, 23 bp, Homo sapiens
cctgctactctcgggggccctgg

SEQ ID NO: 4368 - DNA, 23 bp, Homo sapiens
cctgctactctcgggggctctgg

SEQ ID NO: 4369 - DNA, 23 bp, Homo sapiens
cctgctactcttgggggccctgg

SEQ ID NO: 4370 - DNA, 23 bp, Homo sapiens
cctgctccacccacggcgcccgg

SEQ ID NO: 4371 - DNA, 23 bp, Homo sapiens
cctgctctatccacggcgcccgg

SEQ ID NO: 4372 - DNA, 23 bp, Homo sapiens
cctgctctatccatggcgcccgg

SEQ ID NO: 4373 - DNA, 23 bp, Homo sapiens
cctgctctctgacacaattaagg

SEQ ID NO: 4374 - DNA, 23 bp, Homo sapiens
cctgctctctgactcaattaagg

SEQ ID NO: 4375 - DNA, 23 bp, Homo sapiens
cctgctctgtgacacaattaagg

SEQ ID NO: 4376 - DNA, 23 bp, Homo sapiens
cctgctgaagggctccagaaggg

SEQ ID NO: 4377 - DNA, 23 bp, Homo sapiens
cctgctgctctcggcggccctgg

SEQ ID NO: 4378 - DNA, 23 bp, Homo sapiens
cctgctgctctcgggagccctgg

SEQ ID NO: 4379 - DNA, 23 bp, Homo sapiens
cctgctgctctcgggaggcctgg

SEQ ID NO: 4380 - DNA, 23 bp, Homo sapiens
cctgctgctctcgggagtcctgg

SEQ ID NO: 4381 - DNA, 23 bp, Homo sapiens
cctgctgctctggggggcagtgg

SEQ ID NO: 4382 - DNA, 23 bp, Homo sapiens
cctgctgctctggggggccctgg

SEQ ID NO: 4383 - DNA, 23 bp, Homo sapiens
cctgctggtacccgcggaggagg

SEQ ID NO: 4384 - DNA, 23 bp, Homo sapiens
cctggccctgacccagaccaggg

SEQ ID NO: 4385 - DNA, 23 bp, Homo sapiens
cctggccctgacccagacctggg

SEQ ID NO: 4386 - DNA, 23 bp, Homo sapiens
cctggccctgaccgagacctggg

SEQ ID NO: 4387 - DNA, 23 bp, Homo sapiens
cctggccctgatcgagacctggg

SEQ ID NO: 4388 - DNA, 23 bp, Homo sapiens
cctggcgggggcgcaagacccgg

SEQ ID NO: 4389 - DNA, 23 bp, Homo sapiens
cctggcgggggcgcaggacccgg

SEQ ID NO: 4390 - DNA, 23 bp, Homo sapiens
cctggcgggggcgcaggaccggg

SEQ ID NO: 4391 - DNA, 23 bp, Homo sapiens
cctggctgtcctagcagttgtgg

SEQ ID NO: 4392 - DNA, 23 bp, Homo sapiens
cctggctgtcctggctgtcctgg

SEQ ID NO: 4393 - DNA, 23 bp, Homo sapiens
cctgggcactgtcactgcctggg

SEQ ID NO: 4394 - DNA, 23 bp, Homo sapiens
cctgggcactgttgctgcctggg

SEQ ID NO: 4395 - DNA, 23 bp, Homo sapiens
cctgggcactgttgctggctggg

SEQ ID NO: 4396 - DNA, 23 bp, Homo sapiens
cctgggcctctcccgggacaagg

SEQ ID NO: 4397 - DNA, 23 bp, Homo sapiens
cctgggcctctcccggggcaagg

SEQ ID NO: 4398 - DNA, 23 bp, Homo sapiens
cctgggcctctcccgggtcaagg

SEQ ID NO: 4399 - DNA, 23 bp, Homo sapiens
cctggggctctcgccggtcgagg

SEQ ID NO: 4400 - DNA, 23 bp, Homo sapiens
cctggtcatacccgcggaggagg

SEQ ID NO: 4401 - DNA, 23 bp, Homo sapiens
cctggtctgggtcagggccaggg

SEQ ID NO: 4402 - DNA, 23 bp, Homo sapiens
cctggtggtacccgcggaggagg

SEQ ID NO: 4403 - DNA, 23 bp, Homo sapiens
cctgtgaggggacagggaggagg

SEQ ID NO: 4404 - DNA, 23 bp, Homo sapiens
cctgtgagtgcgaggttgggagg

SEQ ID NO: 4405 - DNA, 23 bp, Homo sapiens
cctgtgagtgcggggttaggagg

SEQ ID NO: 4406 - DNA, 23 bp, Homo sapiens
cctgtgagtgcggggttgggagg

SEQ ID NO: 4407 - DNA, 23 bp, Homo sapiens
cctgtgtccaggctggcgtctgg

SEQ ID NO: 4408 - DNA, 23 bp, Homo sapiens
cctgtgtccaggctggtgtctgg

SEQ ID NO: 4409 - DNA, 23 bp, Homo sapiens
cctgtgtgggactgagatgcagg

SEQ ID NO: 4410 - DNA, 23 bp, Homo sapiens
cctgttagcataatgtgaggagg

SEQ ID NO: 4411 - DNA, 23 bp, Homo sapiens
cctgttagcctaatgtgaggagg

SEQ ID NO: 4412 - DNA, 23 bp, Homo sapiens
ccttaattgagtcagagagcagg

SEQ ID NO: 4413 - DNA, 23 bp, Homo sapiens
ccttaattgtgtcacagagcagg

SEQ ID NO: 4414 - DNA, 23 bp, Homo sapiens
ccttaattgtgtcagagagcagg

SEQ ID NO: 4415 - DNA, 23 bp, Homo sapiens
ccttaccccagctcagggtgagg

SEQ ID NO: 4416 - DNA, 23 bp, Homo sapiens
ccttaccccatctcagggtgagg

SEQ ID NO: 4417 - DNA, 23 bp, Homo sapiens
ccttactccatctcagggtgagg

SEQ ID NO: 4418 - DNA, 23 bp, Homo sapiens
ccttcacattccgtgtctcctgg

SEQ ID NO: 4419 - DNA, 23 bp, Homo sapiens
ccttcacattccgtgtctgcagg

SEQ ID NO: 4420 - DNA, 23 bp, Homo sapiens
ccttcacattccgtgtgttccgg

SEQ ID NO: 4421 - DNA, 23 bp, Homo sapiens
ccttcactttccgtgtgttccgg

SEQ ID NO: 4422 - DNA, 23 bp, Homo sapiens
ccttcatattccgtgtctcctgg

SEQ ID NO: 4423 - DNA, 23 bp, Homo sapiens
ccttcatgttccgtgtctcccgg

SEQ ID NO: 4424 - DNA, 23 bp, Homo sapiens
ccttctggagcccttcagcaggg

SEQ ID NO: 4425 - DNA, 23 bp, Homo sapiens
ccttctggagcccttcagccggg

SEQ ID NO: 4426 - DNA, 23 bp, Homo sapiens
ccttgacccgggagaggcccagg

SEQ ID NO: 4427 - DNA, 23 bp, Homo sapiens
ccttgatgattatggtgttgggg

SEQ ID NO: 4428 - DNA, 23 bp, Homo sapiens
ccttgatggttgtggtgttgggg

SEQ ID NO: 4429 - DNA, 23 bp, Homo sapiens
ccttgcagatctgtgtctcccgg

SEQ ID NO: 4430 - DNA, 23 bp, Homo sapiens
ccttgccccgggagaggcccagg

SEQ ID NO: 4431 - DNA, 23 bp, Homo sapiens
ccttgccgtcgtaggcgaactgg

SEQ ID NO: 4432 - DNA, 23 bp, Homo sapiens
ccttgccgtcgtaggcggactgg

SEQ ID NO: 4433 - DNA, 23 bp, Homo sapiens
ccttgccgtcgtaggcgtactgg

SEQ ID NO: 4434 - DNA, 23 bp, Homo sapiens
ccttgccgtcgtaggcgtcctgg

SEQ ID NO: 4435 - DNA, 23 bp, Homo sapiens
ccttgccgtcgtaggctaactgg

SEQ ID NO: 4436 - DNA, 23 bp, Homo sapiens
ccttggggtggatctcagacggg

SEQ ID NO: 4437 - DNA, 23 bp, Homo sapiens
ccttggtggttgtggtgttgggg

SEQ ID NO: 4438 - DNA, 23 bp, Homo sapiens
ccttgtagatctgtgtgttccgg

SEQ ID NO: 4439 - DNA, 23 bp, Homo sapiens
ccttgtcccgggagaggcccagg

SEQ ID NO: 4440 - DNA, 23 bp, Homo sapiens
cctttacccggtttcattttcgg

SEQ ID NO: 4441 - DNA, 23 bp, Homo sapiens
cctttgcagaaacaaagtcaggg

SEQ ID NO: 4442 - DNA, 23 bp, Homo sapiens
cgaactggtcatacccgcggagg

SEQ ID NO: 4443 - DNA, 23 bp, Homo sapiens
cgaactggtcatgcccgcggagg

SEQ ID NO: 4444 - DNA, 23 bp, Homo sapiens
cgaactggttatacccgcggagg

SEQ ID NO: 4445 - DNA, 23 bp, Homo sapiens
cgaactggttatgcccgcggagg

SEQ ID NO: 4446 - DNA, 23 bp, Homo sapiens
cgaagcccctcaccctgagatgg

SEQ ID NO: 4447 - DNA, 23 bp, Homo sapiens
cgaaggcggtatatggattgggg

SEQ ID NO: 4448 - DNA, 23 bp, Homo sapiens
cgaaggcggtgtatggattgggg

SEQ ID NO: 4449 - DNA, 23 bp, Homo sapiens
cgaagtcccaggccccgggcggg

SEQ ID NO: 4450 - DNA, 23 bp, Homo sapiens
cgaagtcccaggtcccggacggg

SEQ ID NO: 4451 - DNA, 23 bp, Homo sapiens
cgaagtcccaggtcccgggcggg

SEQ ID NO: 4452 - DNA, 23 bp, Homo sapiens
cgaagtcccatgtcccggacggg

SEQ ID NO: 4453 - DNA, 23 bp, Homo sapiens
cgaccaacccgcggggattttgg

SEQ ID NO: 4454 - DNA, 23 bp, Homo sapiens
cgacccctccccatcccccacgg

SEQ ID NO: 4455 - DNA, 23 bp, Homo sapiens
cgacccctcctcatcccccacgg

SEQ ID NO: 4456 - DNA, 23 bp, Homo sapiens
cgacccgcactcaccggcccagg

SEQ ID NO: 4457 - DNA, 23 bp, Homo sapiens
cgacctataggagatggggaagg

SEQ ID NO: 4458 - DNA, 23 bp, Homo sapiens
cgacctctccccatcccccacgg

SEQ ID NO: 4459 - DNA, 23 bp, Homo sapiens
cgacgccacgagtccgaggaagg

SEQ ID NO: 4460 - DNA, 23 bp, Homo sapiens
cgacgccacgagtccgaggatgg

SEQ ID NO: 4461 - DNA, 23 bp, Homo sapiens
cgacgccgcgagccagaagatgg

SEQ ID NO: 4462 - DNA, 23 bp, Homo sapiens
cgacgccgcgagccagaggatgg

SEQ ID NO: 4463 - DNA, 23 bp, Homo sapiens
cgacgccgcgagccggaggatgg

SEQ ID NO: 4464 - DNA, 23 bp, Homo sapiens
cgacgccgcgagtccaagagggg

SEQ ID NO: 4465 - DNA, 23 bp, Homo sapiens
cgacgccgcgagtccgagagagg

SEQ ID NO: 4466 - DNA, 23 bp, Homo sapiens
cgacgccgcgagtccgagagggg

SEQ ID NO: 4467 - DNA, 23 bp, Homo sapiens
cgacgccgcgagtccgaggaagg

SEQ ID NO: 4468 - DNA, 23 bp, Homo sapiens
cgacgccgcgagtccgaggacgg

SEQ ID NO: 4469 - DNA, 23 bp, Homo sapiens
cgacgccgcgagtccgaggatgg

SEQ ID NO: 4470 - DNA, 23 bp, Homo sapiens
cgagacccttgacccgggagagg

SEQ ID NO: 4471 - DNA, 23 bp, Homo sapiens
cgagacccttgccccgggagagg

SEQ ID NO: 4472 - DNA, 23 bp, Homo sapiens
cgagacccttgtcccgggagagg

SEQ ID NO: 4473 - DNA, 23 bp, Homo sapiens
cgagagccttgtctgcattgggg

SEQ ID NO: 4474 - DNA, 23 bp, Homo sapiens
cgagatccaccccgaagccgcgg

SEQ ID NO: 4475 - DNA, 23 bp, Homo sapiens
cgagatccgccccgaagccgcgg

SEQ ID NO: 4476 - DNA, 23 bp, Homo sapiens
cgagccagaagatggagccgcgg

SEQ ID NO: 4477 - DNA, 23 bp, Homo sapiens
cgagccagaggatggagccgcgg

SEQ ID NO: 4478 - DNA, 23 bp, Homo sapiens
cgagcccctcaccctgagatggg

SEQ ID NO: 4479 - DNA, 23 bp, Homo sapiens
cgagccggaggatggagccgcgg

SEQ ID NO: 4480 - DNA, 23 bp, Homo sapiens
cgagctccgtgtcctgggtctgg

SEQ ID NO: 4481 - DNA, 23 bp, Homo sapiens
cgaggagacacggaatgtgaagg

SEQ ID NO: 4482 - DNA, 23 bp, Homo sapiens
cgaggagacagggaaagtgaagg

SEQ ID NO: 4483 - DNA, 23 bp, Homo sapiens
cgagggccgcgtctgcaatgggg

SEQ ID NO: 4484 - DNA, 23 bp, Homo sapiens
cgagggccgcgtctgcattgggg

SEQ ID NO: 4485 - DNA, 23 bp, Homo sapiens
cgagtccaagaggggagccgcgg

SEQ ID NO: 4486 - DNA, 23 bp, Homo sapiens
cgagtccgagagaggagccgcgg

SEQ ID NO: 4487 - DNA, 23 bp, Homo sapiens
cgagtccgagaggggagccccgg

SEQ ID NO: 4488 - DNA, 23 bp, Homo sapiens
cgagtccgagaggggagccgcgg

SEQ ID NO: 4489 - DNA, 23 bp, Homo sapiens
cgagtccgaggaaggagccgcgg

SEQ ID NO: 4490 - DNA, 23 bp, Homo sapiens
cgagtccgaggacggagccccgg

SEQ ID NO: 4491 - DNA, 23 bp, Homo sapiens
cgagtccgaggatggcgccccgg

SEQ ID NO: 4492 - DNA, 23 bp, Homo sapiens
cgagtccgggtgggtgactgggg

SEQ ID NO: 4493 - DNA, 23 bp, Homo sapiens
cgagtctctgagcggggaacagg

SEQ ID NO: 4494 - DNA, 23 bp, Homo sapiens
cgagtctctgagtggggaacagg

SEQ ID NO: 4495 - DNA, 23 bp, Homo sapiens
cgatgaagcggggctccccgcgg

SEQ ID NO: 4496 - DNA, 23 bp, Homo sapiens
cgatgaagcggggctctccgcgg

SEQ ID NO: 4497 - DNA, 23 bp, Homo sapiens
cgatgaagcggggcttcccgcgg

SEQ ID NO: 4498 - DNA, 23 bp, Homo sapiens
cgatgaagtggggctccccgcgg

SEQ ID NO: 4499 - DNA, 23 bp, Homo sapiens
cgatgaagtggggctctccgcgg

SEQ ID NO: 4500 - DNA, 23 bp, Homo sapiens
cgatgtacggctgcgacgtgggg

SEQ ID NO: 4501 - DNA, 23 bp, Homo sapiens
cgatgtatggctgcgacctgggg

SEQ ID NO: 4502 - DNA, 23 bp, Homo sapiens
cgatgtatggctgcgacgtgggg

SEQ ID NO: 4503 - DNA, 23 bp, Homo sapiens
cgcacgggtaccaggggccacgg

SEQ ID NO: 4504 - DNA, 23 bp, Homo sapiens
cgcacgggtaccgggggccacgg

SEQ ID NO: 4505 - DNA, 23 bp, Homo sapiens
cgcactcacccgcccaggtctgg

SEQ ID NO: 4506 - DNA, 23 bp, Homo sapiens
cgcactcacccgccctggtctgg

SEQ ID NO: 4507 - DNA, 23 bp, Homo sapiens
cgcactcacctgcccaggtctgg

SEQ ID NO: 4508 - DNA, 23 bp, Homo sapiens
cgcagccaaacatcatctggagg

SEQ ID NO: 4509 - DNA, 23 bp, Homo sapiens
cgcagccaaacatccactggagg

SEQ ID NO: 4510 - DNA, 23 bp, Homo sapiens
cgcagccaaacatcctctggagg

SEQ ID NO: 4511 - DNA, 23 bp, Homo sapiens
cgcagccacacatccactggagg

SEQ ID NO: 4512 - DNA, 23 bp, Homo sapiens
cgcagccagacatcctctggagg

SEQ ID NO: 4513 - DNA, 23 bp, Homo sapiens
cgcagccatacatattctggagg

SEQ ID NO: 4514 - DNA, 23 bp, Homo sapiens
cgcagccatacatccactggagg

SEQ ID NO: 4515 - DNA, 23 bp, Homo sapiens
cgcagccatacatcctctggagg

SEQ ID NO: 4516 - DNA, 23 bp, Homo sapiens
cgcagccgtacatccactggagg

SEQ ID NO: 4517 - DNA, 23 bp, Homo sapiens
cgcagccgtacatcctctggagg

SEQ ID NO: 4518 - DNA, 23 bp, Homo sapiens
cgcagccgtacatgctctggagg

SEQ ID NO: 4519 - DNA, 23 bp, Homo sapiens
cgcaggagacgtgggacaggagg

SEQ ID NO: 4520 - DNA, 23 bp, Homo sapiens
cgcaggagatgtgggacaagagg

SEQ ID NO: 4521 - DNA, 23 bp, Homo sapiens
cgcagggaggagggtcgggcggg

SEQ ID NO: 4522 - DNA, 23 bp, Homo sapiens
cgcagggaggtgggtcgggcggg

SEQ ID NO: 4523 - DNA, 23 bp, Homo sapiens
cgcaggtaccaggggcagtgggg

SEQ ID NO: 4524 - DNA, 23 bp, Homo sapiens
cgcatgctcaatacatccaatgg

SEQ ID NO: 4525 - DNA, 23 bp, Homo sapiens
cgccatgacggccatcctcgggg

SEQ ID NO: 4526 - DNA, 23 bp, Homo sapiens
cgccatggatagagcaagagggg

SEQ ID NO: 4527 - DNA, 23 bp, Homo sapiens
cgccatggatagagcaggagggg

SEQ ID NO: 4528 - DNA, 23 bp, Homo sapiens
cgcccaacccgcggggattttgg

SEQ ID NO: 4529 - DNA, 23 bp, Homo sapiens
cgcccagccccgaccaacccggg

SEQ ID NO: 4530 - DNA, 23 bp, Homo sapiens
cgccccgccccgaccaacccggg

SEQ ID NO: 4531 - DNA, 23 bp, Homo sapiens
cgccccgccccgaccaacctggg

SEQ ID NO: 4532 - DNA, 23 bp, Homo sapiens
cgccccgccccgacccacccggg

SEQ ID NO: 4533 - DNA, 23 bp, Homo sapiens
cgcccggccccgaccaacccggg

SEQ ID NO: 4534 - DNA, 23 bp, Homo sapiens
cgccctccctctggtcctgaggg

SEQ ID NO: 4535 - DNA, 23 bp, Homo sapiens
cgccctcctgaaggtcctcaggg

SEQ ID NO: 4536 - DNA, 23 bp, Homo sapiens
cgccgagagcagcaggaggacgg

SEQ ID NO: 4537 - DNA, 23 bp, Homo sapiens
cgccgggacgagggtcgggcagg

SEQ ID NO: 4538 - DNA, 23 bp, Homo sapiens
cgccgggaggagggtcgggcagg

SEQ ID NO: 4539 - DNA, 23 bp, Homo sapiens
cgccgggaggagggtcgggcggg

SEQ ID NO: 4540 - DNA, 23 bp, Homo sapiens
cgccgggaggagggtcgggtggg

SEQ ID NO: 4541 - DNA, 23 bp, Homo sapiens
cgccgggaggagggtcggtcagg

SEQ ID NO: 4542 - DNA, 23 bp, Homo sapiens
cgccgggaggagggtctggcggg

SEQ ID NO: 4543 - DNA, 23 bp, Homo sapiens
cgccggtcgagggtctgggcggg

SEQ ID NO: 4544 - DNA, 23 bp, Homo sapiens
cgccggtcgagggtttgggcggg

SEQ ID NO: 4545 - DNA, 23 bp, Homo sapiens
cgccgtggatagagcaagagggg

SEQ ID NO: 4546 - DNA, 23 bp, Homo sapiens
cgccgtggatagagcaggagagg

SEQ ID NO: 4547 - DNA, 23 bp, Homo sapiens
cgccgtggatagagcaggagggg

SEQ ID NO: 4548 - DNA, 23 bp, Homo sapiens
cgccgtgggtggagcaggagggg

SEQ ID NO: 4549 - DNA, 23 bp, Homo sapiens
cgccgtgtccgcagcggtccagg

SEQ ID NO: 4550 - DNA, 23 bp, Homo sapiens
cgccgtgtccgccgcggtccagg

SEQ ID NO: 4551 - DNA, 23 bp, Homo sapiens
cgccgtgtccgcggcagtccagg

SEQ ID NO: 4552 - DNA, 23 bp, Homo sapiens
cgccgtgtccgcggcggtccagg

SEQ ID NO: 4553 - DNA, 23 bp, Homo sapiens
cgcctatagatctcccgggctgg

SEQ ID NO: 4554 - DNA, 23 bp, Homo sapiens
cgcctcccacttgtgcttggtgg

SEQ ID NO: 4555 - DNA, 23 bp, Homo sapiens
cgcctctgcggggagaagcaagg

SEQ ID NO: 4556 - DNA, 23 bp, Homo sapiens
cgcctggaggagggtcgggcggg

SEQ ID NO: 4557 - DNA, 23 bp, Homo sapiens
cgcctgtagatctcccgggctgg

SEQ ID NO: 4558 - DNA, 23 bp, Homo sapiens
cgcctgtaggtctcccgggctgg

SEQ ID NO: 4559 - DNA, 23 bp, Homo sapiens
cgccttgatggttgtggtgttgg

SEQ ID NO: 4560 - DNA, 23 bp, Homo sapiens
cgccttgtccgcggcggtccagg

SEQ ID NO: 4561 - DNA, 23 bp, Homo sapiens
cgcgcaggtaccaggggcagtgg

SEQ ID NO: 4562 - DNA, 23 bp, Homo sapiens
cgcgcgggtaccaggggcagtgg

SEQ ID NO: 4563 - DNA, 23 bp, Homo sapiens
cgcgctggtaccaggggcagtgg

SEQ ID NO: 4564 - DNA, 23 bp, Homo sapiens
cgcggcttcggggcggatctcgg

SEQ ID NO: 4565 - DNA, 23 bp, Homo sapiens
cgcggcttcggggtggatctcgg

SEQ ID NO: 4566 - DNA, 23 bp, Homo sapiens
cgcgggacggggctgaccacggg

SEQ ID NO: 4567 - DNA, 23 bp, Homo sapiens
cgcgggtaccaggggcagtgggg

SEQ ID NO: 4568 - DNA, 23 bp, Homo sapiens
cgcggtgtccgccgcggtccagg

SEQ ID NO: 4569 - DNA, 23 bp, Homo sapiens
cgcggtgtccgcggcggtccagg

SEQ ID NO: 4570 - DNA, 23 bp, Homo sapiens
cgctcggtcagtctgtgactggg

SEQ ID NO: 4571 - DNA, 23 bp, Homo sapiens
cgctcggtcagtctgtgagtggg

SEQ ID NO: 4572 - DNA, 23 bp, Homo sapiens
cgctcggttagtctgtgagtggg

SEQ ID NO: 4573 - DNA, 23 bp, Homo sapiens
cgctgcagcgcacgggtaccagg

SEQ ID NO: 4574 - DNA, 23 bp, Homo sapiens
cgctgcagcgcacgggtaccggg

SEQ ID NO: 4575 - DNA, 23 bp, Homo sapiens
cgctgcagcgcgcaggtaccagg

SEQ ID NO: 4576 - DNA, 23 bp, Homo sapiens
cgctgcagcgcgcgggtaccagg

SEQ ID NO: 4577 - DNA, 23 bp, Homo sapiens
cgctggagcgcgcgggtaccagg

SEQ ID NO: 4578 - DNA, 23 bp, Homo sapiens
cgctggtaccaggggcagtgggg

SEQ ID NO: 4579 - DNA, 23 bp, Homo sapiens
cgctgtcgaacctcacgaactgg

SEQ ID NO: 4580 - DNA, 23 bp, Homo sapiens
cgctgtgtccgcggcggtccagg

SEQ ID NO: 4581 - DNA, 23 bp, Homo sapiens
cgcttgtaaaggtgagattctgg

SEQ ID NO: 4582 - DNA, 23 bp, Homo sapiens
cggacaggacacctggggtgggg

SEQ ID NO: 4583 - DNA, 23 bp, Homo sapiens
cggacgggcgcctcctccgcggg

SEQ ID NO: 4584 - DNA, 23 bp, Homo sapiens
cggacgggcgcttcctccgcggg

SEQ ID NO: 4585 - DNA, 23 bp, Homo sapiens
cggacggggctcgggggactggg

SEQ ID NO: 4586 - DNA, 23 bp, Homo sapiens
cggactcacattctccccagagg

SEQ ID NO: 4587 - DNA, 23 bp, Homo sapiens
cggactggcgcttcctccgcggg

SEQ ID NO: 4588 - DNA, 23 bp, Homo sapiens
cggactggcgcttcctgcgcggg

SEQ ID NO: 4589 - DNA, 23 bp, Homo sapiens
cggactggtcatacccgcggagg

SEQ ID NO: 4590 - DNA, 23 bp, Homo sapiens
cggactggtcatgcccgcggagg

SEQ ID NO: 4591 - DNA, 23 bp, Homo sapiens
cggagcccctcaccctgagatgg

SEQ ID NO: 4592 - DNA, 23 bp, Homo sapiens
cggagctgtggtcgctgctgtgg

SEQ ID NO: 4593 - DNA, 23 bp, Homo sapiens
cggatacctggagaacgggaagg

SEQ ID NO: 4594 - DNA, 23 bp, Homo sapiens
cggattccgcagcctcggggtgg

SEQ ID NO: 4595 - DNA, 23 bp, Homo sapiens
cggcagggaaatggcctctgtgg

SEQ ID NO: 4596 - DNA, 23 bp, Homo sapiens
cggcatggcctcccacgaggagg

SEQ ID NO: 4597 - DNA, 23 bp, Homo sapiens
cggccactacaaccagagcgagg

SEQ ID NO: 4598 - DNA, 23 bp, Homo sapiens
cggcccatgaggcggagcagtgg

SEQ ID NO: 4599 - DNA, 23 bp, Homo sapiens
cggcccatgtggcggagcagtgg

SEQ ID NO: 4600 - DNA, 23 bp, Homo sapiens
cggcccgtccgtgggggatgagg

SEQ ID NO: 4601 - DNA, 23 bp, Homo sapiens
cggcccgtgaggcggagcagcgg

SEQ ID NO: 4602 - DNA, 23 bp, Homo sapiens
cggcccgtgaggcggagcagtgg

SEQ ID NO: 4603 - DNA, 23 bp, Homo sapiens
cggcccgtgcggcggagcagtgg

SEQ ID NO: 4604 - DNA, 23 bp, Homo sapiens
cggcccgtgtggcggagcagcgg

SEQ ID NO: 4605 - DNA, 23 bp, Homo sapiens
cggcctcgctctggttgtagtgg

SEQ ID NO: 4606 - DNA, 23 bp, Homo sapiens
cggcgagggcgcaggacccgggg

SEQ ID NO: 4607 - DNA, 23 bp, Homo sapiens
cggctactacaaccagagcgagg

SEQ ID NO: 4608 - DNA, 23 bp, Homo sapiens
cggctactacaaccggagcgagg

SEQ ID NO: 4609 - DNA, 23 bp, Homo sapiens
cggctccatcctccggctcgcgg

SEQ ID NO: 4610 - DNA, 23 bp, Homo sapiens
cggctccatcctctggctcgcgg

SEQ ID NO: 4611 - DNA, 23 bp, Homo sapiens
cggctccatcttctggctcgcgg

SEQ ID NO: 4612 - DNA, 23 bp, Homo sapiens
cggctcccctctcggactcgcgg

SEQ ID NO: 4613 - DNA, 23 bp, Homo sapiens
cggctcccctcttggactcgcgg

SEQ ID NO: 4614 - DNA, 23 bp, Homo sapiens
cggctcctctctcggactcgcgg

SEQ ID NO: 4615 - DNA, 23 bp, Homo sapiens
cggctccttcctcggactcgcgg

SEQ ID NO: 4616 - DNA, 23 bp, Homo sapiens
cggctccttcctcggactcgtgg

SEQ ID NO: 4617 - DNA, 23 bp, Homo sapiens
cgggaagagtcagaaaattcagg

SEQ ID NO: 4618 - DNA, 23 bp, Homo sapiens
cgggaagccgcgccgggaggagg

SEQ ID NO: 4619 - DNA, 23 bp, Homo sapiens
cgggaagccgcgcctggaggagg

SEQ ID NO: 4620 - DNA, 23 bp, Homo sapiens
cgggacacctggggtggggaagg

SEQ ID NO: 4621 - DNA, 23 bp, Homo sapiens
cgggacctgcgccccgggccggg

SEQ ID NO: 4622 - DNA, 23 bp, Homo sapiens
cgggacggggctgaccacggggg

SEQ ID NO: 4623 - DNA, 23 bp, Homo sapiens
cgggactggggcggggctcgggg

SEQ ID NO: 4624 - DNA, 23 bp, Homo sapiens
cgggagacctacaggcgatcagg

SEQ ID NO: 4625 - DNA, 23 bp, Homo sapiens
cgggagactcggggcgacccggg

SEQ ID NO: 4626 - DNA, 23 bp, Homo sapiens
cgggagacttggggcgacccggg

SEQ ID NO: 4627 - DNA, 23 bp, Homo sapiens
cgggagatctacaggagataggg

SEQ ID NO: 4628 - DNA, 23 bp, Homo sapiens
cgggagatctacaggagatgggg

SEQ ID NO: 4629 - DNA, 23 bp, Homo sapiens
cgggagatctacaggcgatcagg

SEQ ID NO: 4630 - DNA, 23 bp, Homo sapiens
cgggagatctacgggagatgggg

SEQ ID NO: 4631 - DNA, 23 bp, Homo sapiens
cgggagatctataggagatgggg

SEQ ID NO: 4632 - DNA, 23 bp, Homo sapiens
cgggagatctataggcgatcagg

SEQ ID NO: 4633 - DNA, 23 bp, Homo sapiens
cgggagggaaaccgcctctgcgg

SEQ ID NO: 4634 - DNA, 23 bp, Homo sapiens
cgggagggaaacggcctctgcgg

SEQ ID NO: 4635 - DNA, 23 bp, Homo sapiens
cgggagggaaacggcctctgtgg

SEQ ID NO: 4636 - DNA, 23 bp, Homo sapiens
cgggagggaaatggcctctgtgg

SEQ ID NO: 4637 - DNA, 23 bp, Homo sapiens
cgggatggcctcccacgaggagg

SEQ ID NO: 4638 - DNA, 23 bp, Homo sapiens
cgggatggccttccacgaggagg

SEQ ID NO: 4639 - DNA, 23 bp, Homo sapiens
cgggcagggcttgggggactggg

SEQ ID NO: 4640 - DNA, 23 bp, Homo sapiens
cgggccgggacacggaggtgtgg

SEQ ID NO: 4641 - DNA, 23 bp, Homo sapiens
cgggccgggacatggcggtgtgg

SEQ ID NO: 4642 - DNA, 23 bp, Homo sapiens
cgggccgtacgtgggggatgggg

SEQ ID NO: 4643 - DNA, 23 bp, Homo sapiens
cgggccgtccgtgggggatgagg

SEQ ID NO: 4644 - DNA, 23 bp, Homo sapiens
cgggccgtccgtgggggatgggg

SEQ ID NO: 4645 - DNA, 23 bp, Homo sapiens
cgggcggggctcgggggactggg

SEQ ID NO: 4646 - DNA, 23 bp, Homo sapiens
cgggctggcctcccacaaggagg

SEQ ID NO: 4647 - DNA, 23 bp, Homo sapiens
cggggagacacggaaagtgaagg

SEQ ID NO: 4648 - DNA, 23 bp, Homo sapiens
cggggagacacggaacatgaagg

SEQ ID NO: 4649 - DNA, 23 bp, Homo sapiens
cggggagactcggggcgacccgg

SEQ ID NO: 4650 - DNA, 23 bp, Homo sapiens
cggggagactctaggcgacccgg

SEQ ID NO: 4651 - DNA, 23 bp, Homo sapiens
cggggagactctgggcgacccgg

SEQ ID NO: 4652 - DNA, 23 bp, Homo sapiens
cggggagccgcgcagggaggagg

SEQ ID NO: 4653 - DNA, 23 bp, Homo sapiens
cggggagccgcgcagggaggtgg

SEQ ID NO: 4654 - DNA, 23 bp, Homo sapiens
cggggagccgcgccgggaggagg

SEQ ID NO: 4655 - DNA, 23 bp, Homo sapiens
cggggccagggtctcacacttgg

SEQ ID NO: 4656 - DNA, 23 bp, Homo sapiens
cggggccctcagaggaaactcgg

SEQ ID NO: 4657 - DNA, 23 bp, Homo sapiens
cggggccggacggggctcggggg

SEQ ID NO: 4658 - DNA, 23 bp, Homo sapiens
cggggccgggcagggcttggggg

SEQ ID NO: 4659 - DNA, 23 bp, Homo sapiens
cggggccgggcggggctcggggg

SEQ ID NO: 4660 - DNA, 23 bp, Homo sapiens
cggggcggggcggggctcggggg

SEQ ID NO: 4661 - DNA, 23 bp, Homo sapiens
cggggcggggctcgggggaccgg

SEQ ID NO: 4662 - DNA, 23 bp, Homo sapiens
cggggcggggctcgggggacggg

SEQ ID NO: 4663 - DNA, 23 bp, Homo sapiens
cggggcggggctcgggggactgg

SEQ ID NO: 4664 - DNA, 23 bp, Homo sapiens
cggggcggggctcggggggacgg

SEQ ID NO: 4665 - DNA, 23 bp, Homo sapiens
cggggctgaccacgggggcgggg

SEQ ID NO: 4666 - DNA, 23 bp, Homo sapiens
cggggctgaccgcggggccgggg

SEQ ID NO: 4667 - DNA, 23 bp, Homo sapiens
cggggctgaccgcggggcctggg

SEQ ID NO: 4668 - DNA, 23 bp, Homo sapiens
cggggctgaccgcgggggcgggg

SEQ ID NO: 4669 - DNA, 23 bp, Homo sapiens
cggggctgggcggggctcggggg

SEQ ID NO: 4670 - DNA, 23 bp, Homo sapiens
cggggctggggcggggctcgcgg

SEQ ID NO: 4671 - DNA, 23 bp, Homo sapiens
cggggctggggcggggctcgggg

SEQ ID NO: 4672 - DNA, 23 bp, Homo sapiens
cgggggaccgggctgaccacggg

SEQ ID NO: 4673 - DNA, 23 bp, Homo sapiens
cgggggaccgggctgaccgcggg

SEQ ID NO: 4674 - DNA, 23 bp, Homo sapiens
cgggggaccgggctgacctcggg

SEQ ID NO: 4675 - DNA, 23 bp, Homo sapiens
cgggggacgggctgaccacgggg

SEQ ID NO: 4676 - DNA, 23 bp, Homo sapiens
cgggggacggggctgaccacggg

SEQ ID NO: 4677 - DNA, 23 bp, Homo sapiens
cgggggacggggctgaccgcggg

SEQ ID NO: 4678 - DNA, 23 bp, Homo sapiens
cgggggacggtgctgaccgcggg

SEQ ID NO: 4679 - DNA, 23 bp, Homo sapiens
cgggggactgggctgaccgcggg

SEQ ID NO: 4680 - DNA, 23 bp, Homo sapiens
cgggggactgggctgaccgtggg

SEQ ID NO: 4681 - DNA, 23 bp, Homo sapiens
cggggggacggggctgaccgcgg

SEQ ID NO: 4682 - DNA, 23 bp, Homo sapiens
cggggggactgggctgaccgcgg

SEQ ID NO: 4683 - DNA, 23 bp, Homo sapiens
cgggggggggtggggtggggagg

SEQ ID NO: 4684 - DNA, 23 bp, Homo sapiens
cggggggggtggggtggggaggg

SEQ ID NO: 4685 - DNA, 23 bp, Homo sapiens
cggggggggtggtggggcagagg

SEQ ID NO: 4686 - DNA, 23 bp, Homo sapiens
cgggggtgtcatgtcttttaggg

SEQ ID NO: 4687 - DNA, 23 bp, Homo sapiens
cggggtggggcagaggggaaagg

SEQ ID NO: 4688 - DNA, 23 bp, Homo sapiens
cgggtagccgcgccgggaggagg

SEQ ID NO: 4689 - DNA, 23 bp, Homo sapiens
cgggtcagggctgaggcttgggg

SEQ ID NO: 4690 - DNA, 23 bp, Homo sapiens
cgggtcccgcggcctcagggagg

SEQ ID NO: 4691 - DNA, 23 bp, Homo sapiens
cgggtcccgcggcctcagggggg

SEQ ID NO: 4692 - DNA, 23 bp, Homo sapiens
cgggtctgagatccaccccgagg

SEQ ID NO: 4693 - DNA, 23 bp, Homo sapiens
cgggtgagtgcggggtcgggagg

SEQ ID NO: 4694 - DNA, 23 bp, Homo sapiens
cgggtgagtgcggggtcgtgggg

SEQ ID NO: 4695 - DNA, 23 bp, Homo sapiens
cgggtgggtcggggcggggcggg

SEQ ID NO: 4696 - DNA, 23 bp, Homo sapiens
cgggtgggtgacttcagaaccgg

SEQ ID NO: 4697 - DNA, 23 bp, Homo sapiens
cgggttccgcagatccaccttgg

SEQ ID NO: 4698 - DNA, 23 bp, Homo sapiens
cgggttccgcagcctcggggagg

SEQ ID NO: 4699 - DNA, 23 bp, Homo sapiens
cgggttccgcagcctcggggtgg

SEQ ID NO: 4700 - DNA, 23 bp, Homo sapiens
cgggttgggcggggcggggcggg

SEQ ID NO: 4701 - DNA, 23 bp, Homo sapiens
cgggttggtcagggcggggcggg

SEQ ID NO: 4702 - DNA, 23 bp, Homo sapiens
cgggttggtcgggactggggcgg

SEQ ID NO: 4703 - DNA, 23 bp, Homo sapiens
cgggttggtcggggccggacggg

SEQ ID NO: 4704 - DNA, 23 bp, Homo sapiens
cgggttggtcggggccgggcagg

SEQ ID NO: 4705 - DNA, 23 bp, Homo sapiens
cgggttggtcggggccgggcggg

SEQ ID NO: 4706 - DNA, 23 bp, Homo sapiens
cgggttggtcggggcggggcggg

SEQ ID NO: 4707 - DNA, 23 bp, Homo sapiens
cgggttggtcggggctgggcggg

SEQ ID NO: 4708 - DNA, 23 bp, Homo sapiens
cgggttggtcggggctggggcgg

SEQ ID NO: 4709 - DNA, 23 bp, Homo sapiens
cggtccatgcggcggagcagcgg

SEQ ID NO: 4710 - DNA, 23 bp, Homo sapiens
cggtgagtgaccccagcccgggg

SEQ ID NO: 4711 - DNA, 23 bp, Homo sapiens
cggtgagtgaccccgcccggggg

SEQ ID NO: 4712 - DNA, 23 bp, Homo sapiens
cggtgagtgaccccggcccgggg

SEQ ID NO: 4713 - DNA, 23 bp, Homo sapiens
cggtgagtgaccccggccggggg

SEQ ID NO: 4714 - DNA, 23 bp, Homo sapiens
cggtgagtgaccccggcctgggg

SEQ ID NO: 4715 - DNA, 23 bp, Homo sapiens
cggtgagtgcgggatcgggaggg

SEQ ID NO: 4716 - DNA, 23 bp, Homo sapiens
cggtgagtgcggggtcggcaggg

SEQ ID NO: 4717 - DNA, 23 bp, Homo sapiens
cggtgagtgcggggtcgggaggg

SEQ ID NO: 4718 - DNA, 23 bp, Homo sapiens
cggtgagtgcggggttgggaggg

SEQ ID NO: 4719 - DNA, 23 bp, Homo sapiens
cggtgctgaccgcggggccgggg

SEQ ID NO: 4720 - DNA, 23 bp, Homo sapiens
cggttcccaaggctgctgcaggg

SEQ ID NO: 4721 - DNA, 23 bp, Homo sapiens
cggttctgaagtcacccacccgg

SEQ ID NO: 4722 - DNA, 23 bp, Homo sapiens
cgtactggtcatacccgcggagg

SEQ ID NO: 4723 - DNA, 23 bp, Homo sapiens
cgtactggtcatgcccgcggagg

SEQ ID NO: 4724 - DNA, 23 bp, Homo sapiens
cgtactggtggtacccgcgcagg

SEQ ID NO: 4725 - DNA, 23 bp, Homo sapiens
cgtactggtggtacccgcggagg

SEQ ID NO: 4726 - DNA, 23 bp, Homo sapiens
cgtactggttatgcccgcggagg

SEQ ID NO: 4727 - DNA, 23 bp, Homo sapiens
cgtagcccacggcgatgaagcgg

SEQ ID NO: 4728 - DNA, 23 bp, Homo sapiens
cgtagcccacggtgatgaagcgg

SEQ ID NO: 4729 - DNA, 23 bp, Homo sapiens
cgtagcccactgagatgaagcgg

SEQ ID NO: 4730 - DNA, 23 bp, Homo sapiens
cgtagcccactgcaatgaagcgg

SEQ ID NO: 4731 - DNA, 23 bp, Homo sapiens
cgtagcccactgcgatgaagcgg

SEQ ID NO: 4732 - DNA, 23 bp, Homo sapiens
cgtagcccactgcgatgaagtgg

SEQ ID NO: 4733 - DNA, 23 bp, Homo sapiens
cgtccacgcaccggccctccagg

SEQ ID NO: 4734 - DNA, 23 bp, Homo sapiens
cgtccacgcacgtgccctccagg

SEQ ID NO: 4735 - DNA, 23 bp, Homo sapiens
cgtccacgcactcgccctccagg

SEQ ID NO: 4736 - DNA, 23 bp, Homo sapiens
cgtccggccccgaccaacccggg

SEQ ID NO: 4737 - DNA, 23 bp, Homo sapiens
cgtccgtgggggatgaggagggg

SEQ ID NO: 4738 - DNA, 23 bp, Homo sapiens
cgtccgtgggggatggggagagg

SEQ ID NO: 4739 - DNA, 23 bp, Homo sapiens
cgtccgtgggggatggggagggg

SEQ ID NO: 4740 - DNA, 23 bp, Homo sapiens
cgtcctcctgctgctctcggcgg

SEQ ID NO: 4741 - DNA, 23 bp, Homo sapiens
cgtcctcctgctgctctgggggg

SEQ ID NO: 4742 - DNA, 23 bp, Homo sapiens
cgtcctgccggtacccgcggagg

SEQ ID NO: 4743 - DNA, 23 bp, Homo sapiens
cgtcctgctggtacccgcggagg

SEQ ID NO: 4744 - DNA, 23 bp, Homo sapiens
cgtcctggtcatacccgcggagg

SEQ ID NO: 4745 - DNA, 23 bp, Homo sapiens
cgtcctggtggtacccgcggagg

SEQ ID NO: 4746 - DNA, 23 bp, Homo sapiens
cgtcgcagccaaacatcatctgg

SEQ ID NO: 4747 - DNA, 23 bp, Homo sapiens
cgtcgcagccaaacatcctctgg

SEQ ID NO: 4748 - DNA, 23 bp, Homo sapiens
cgtcgcagccacacatcctctgg

SEQ ID NO: 4749 - DNA, 23 bp, Homo sapiens
cgtcgcagccagacatcctctgg

SEQ ID NO: 4750 - DNA, 23 bp, Homo sapiens
cgtcgcagccatacatattctgg

SEQ ID NO: 4751 - DNA, 23 bp, Homo sapiens
cgtcgcagccatacatcacctgg

SEQ ID NO: 4752 - DNA, 23 bp, Homo sapiens
cgtcgcagccatacatcatctgg

SEQ ID NO: 4753 - DNA, 23 bp, Homo sapiens
cgtcgcagccatacatccactgg

SEQ ID NO: 4754 - DNA, 23 bp, Homo sapiens
cgtcgcagccatacatcctctgg

SEQ ID NO: 4755 - DNA, 23 bp, Homo sapiens
cgtcgcagccatacattatctgg

SEQ ID NO: 4756 - DNA, 23 bp, Homo sapiens
cgtcgcagccgtacatcctctgg

SEQ ID NO: 4757 - DNA, 23 bp, Homo sapiens
cgtcgcagccgtacatgctctgg

SEQ ID NO: 4758 - DNA, 23 bp, Homo sapiens
cgtctcccacttgtgcttggtgg

SEQ ID NO: 4759 - DNA, 23 bp, Homo sapiens
cgtgaagaaatcctgcatctcgg

SEQ ID NO: 4760 - DNA, 23 bp, Homo sapiens
cgtgacctgcgccccaggccggg

SEQ ID NO: 4761 - DNA, 23 bp, Homo sapiens
cgtgacctgcgcccccggccggg

SEQ ID NO: 4762 - DNA, 23 bp, Homo sapiens
cgtgacctgcgcccccgggcggg

SEQ ID NO: 4763 - DNA, 23 bp, Homo sapiens
cgtgacctgcgccccgggccggg

SEQ ID NO: 4764 - DNA, 23 bp, Homo sapiens
cgtgacctgcgccccgggctggg

SEQ ID NO: 4765 - DNA, 23 bp, Homo sapiens
cgtgccatatgcagcacgagggg

SEQ ID NO: 4766 - DNA, 23 bp, Homo sapiens
cgtgccatgtgcagcacgagggg

SEQ ID NO: 4767 - DNA, 23 bp, Homo sapiens
cgtgccatgttcagcacgagggg

SEQ ID NO: 4768 - DNA, 23 bp, Homo sapiens
cgtgctgttcatacccgcggagg

SEQ ID NO: 4769 - DNA, 23 bp, Homo sapiens
cgtggagaccaggcctgcagggg

SEQ ID NO: 4770 - DNA, 23 bp, Homo sapiens
cgtggcagccatacatcatctgg

SEQ ID NO: 4771 - DNA, 23 bp, Homo sapiens
cgtgggacaggaggaattagggg

SEQ ID NO: 4772 - DNA, 23 bp, Homo sapiens
cgtgggacaggaggaattatggg

SEQ ID NO: 4773 - DNA, 23 bp, Homo sapiens
cgtgggcatcattgctggcctgg

SEQ ID NO: 4774 - DNA, 23 bp, Homo sapiens
cgtgggcatccttgctggcctgg

SEQ ID NO: 4775 - DNA, 23 bp, Homo sapiens
cgtgggcatcgttgctggcctgg

SEQ ID NO: 4776 - DNA, 23 bp, Homo sapiens
cgtgggcattgttgctggcctgg

SEQ ID NO: 4777 - DNA, 23 bp, Homo sapiens
cgtggggaaaccgcctctgcggg

SEQ ID NO: 4778 - DNA, 23 bp, Homo sapiens
cgtgggggatggggaggggtcgg

SEQ ID NO: 4779 - DNA, 23 bp, Homo sapiens
cgtgtaggcataatgtgaggagg

SEQ ID NO: 4780 - DNA, 23 bp, Homo sapiens
cgtgtcccggcccggccgcgggg

SEQ ID NO: 4781 - DNA, 23 bp, Homo sapiens
cgtgtcctggcccggccgcgggg

SEQ ID NO: 4782 - DNA, 23 bp, Homo sapiens
cgtgtcgtccacgtagcccacgg

SEQ ID NO: 4783 - DNA, 23 bp, Homo sapiens
cgtgtttcctgatcctgccctgg

SEQ ID NO: 4784 - DNA, 23 bp, Homo sapiens
cgtgtttcctgatcctgccttgg

SEQ ID NO: 4785 - DNA, 23 bp, Homo sapiens
cgttctcaggatggtcacatggg

SEQ ID NO: 4786 - DNA, 23 bp, Homo sapiens
cgttgctggcctggctgtcctgg

SEQ ID NO: 4787 - DNA, 23 bp, Homo sapiens
cgtttctggcccagctgtcctgg

SEQ ID NO: 4788 - DNA, 23 bp, Homo sapiens
ctaactggtcatgcccgcggagg

SEQ ID NO: 4789 - DNA, 23 bp, Homo sapiens
ctaactggttatacccgcggagg

SEQ ID NO: 4790 - DNA, 23 bp, Homo sapiens
ctaactggttatgcccgcggagg

SEQ ID NO: 4791 - DNA, 23 bp, Homo sapiens
ctacctggagggcacgtgcgtgg

SEQ ID NO: 4792 - DNA, 23 bp, Homo sapiens
ctacctggagggccggtgcgtgg

SEQ ID NO: 4793 - DNA, 23 bp, Homo sapiens
ctacctggagggcctgtgcgtgg

SEQ ID NO: 4794 - DNA, 23 bp, Homo sapiens
ctacctggagggcgagtgcgtgg

SEQ ID NO: 4795 - DNA, 23 bp, Homo sapiens
ctacctggatggcacgtgcgtgg

SEQ ID NO: 4796 - DNA, 23 bp, Homo sapiens
ctacggagatcacactgacctgg

SEQ ID NO: 4797 - DNA, 23 bp, Homo sapiens
ctacgtagggtccttcatcctgg

SEQ ID NO: 4798 - DNA, 23 bp, Homo sapiens
ctagaatatcaccctccctctgg

SEQ ID NO: 4799 - DNA, 23 bp, Homo sapiens
ctagaatatcgccctccctctgg

SEQ ID NO: 4800 - DNA, 23 bp, Homo sapiens
ctagacacccgacacccaatggg

SEQ ID NO: 4801 - DNA, 23 bp, Homo sapiens
ctagaggaacctccaagtcttgg

SEQ ID NO: 4802 - DNA, 23 bp, Homo sapiens
ctagaggaacctcctagtcttgg

SEQ ID NO: 4803 - DNA, 23 bp, Homo sapiens
ctagaggaacctcgtagccttgg

SEQ ID NO: 4804 - DNA, 23 bp, Homo sapiens
ctagaggaggaattgtgaggtgg

SEQ ID NO: 4805 - DNA, 23 bp, Homo sapiens
ctagaggaggaattgtggggtgg

SEQ ID NO: 4806 - DNA, 23 bp, Homo sapiens
ctagagtgggcgggggggcgggg

SEQ ID NO: 4807 - DNA, 23 bp, Homo sapiens
ctagagtgggcggggggggcggg

SEQ ID NO: 4808 - DNA, 23 bp, Homo sapiens
ctagagtgggcgggggggggtgg

SEQ ID NO: 4809 - DNA, 23 bp, Homo sapiens
ctagagtgggcggggggggtggg

SEQ ID NO: 4810 - DNA, 23 bp, Homo sapiens
ctagagtgggtgggggtggcggg

SEQ ID NO: 4811 - DNA, 23 bp, Homo sapiens
ctagatatccaatacccaatggg

SEQ ID NO: 4812 - DNA, 23 bp, Homo sapiens
ctagatatccgacacccaatggg

SEQ ID NO: 4813 - DNA, 23 bp, Homo sapiens
ctaggacaaccaggacagccagg

SEQ ID NO: 4814 - DNA, 23 bp, Homo sapiens
ctaggacagccaggacagccagg

SEQ ID NO: 4815 - DNA, 23 bp, Homo sapiens
ctaggacagctaggacagccagg

SEQ ID NO: 4816 - DNA, 23 bp, Homo sapiens
ctagggctctctccggtcgaggg

SEQ ID NO: 4817 - DNA, 23 bp, Homo sapiens
ctatctcctgtagatctcccggg

SEQ ID NO: 4818 - DNA, 23 bp, Homo sapiens
ctatgtagggtccttcttcctgg

SEQ ID NO: 4819 - DNA, 23 bp, Homo sapiens
ctatgtcgggtccttcttccagg

SEQ ID NO: 4820 - DNA, 23 bp, Homo sapiens
ctcacactcaatgtgtctgaagg

SEQ ID NO: 4821 - DNA, 23 bp, Homo sapiens
ctcacctttacaagctgtgaggg

SEQ ID NO: 4822 - DNA, 23 bp, Homo sapiens
ctcacgctcaatgtgtttaaagg

SEQ ID NO: 4823 - DNA, 23 bp, Homo sapiens
ctcacgctcaatgtgtttgaagg

SEQ ID NO: 4824 - DNA, 23 bp, Homo sapiens
ctcagaccaccaagcacaagtgg

SEQ ID NO: 4825 - DNA, 23 bp, Homo sapiens
ctcagagtctcaggccccgaagg

SEQ ID NO: 4826 - DNA, 23 bp, Homo sapiens
ctcagatcaccaagcgcaagtgg

SEQ ID NO: 4827 - DNA, 23 bp, Homo sapiens
ctcagatcacccagcgcaagtgg

SEQ ID NO: 4828 - DNA, 23 bp, Homo sapiens
ctcagatcacccagctcaagtgg

SEQ ID NO: 4829 - DNA, 23 bp, Homo sapiens
ctcagatctcccagcgcaagtgg

SEQ ID NO: 4830 - DNA, 23 bp, Homo sapiens
ctcagccactcctcgcccccagg

SEQ ID NO: 4831 - DNA, 23 bp, Homo sapiens
ctcagccactcctcgtccccagg

SEQ ID NO: 4832 - DNA, 23 bp, Homo sapiens
ctcagccactgctcgcccccagg

SEQ ID NO: 4833 - DNA, 23 bp, Homo sapiens
ctcagcccctcctcacccccagg

SEQ ID NO: 4834 - DNA, 23 bp, Homo sapiens
ctcagcccctcctcgcccccagg

SEQ ID NO: 4835 - DNA, 23 bp, Homo sapiens
ctcagcccctcctctcccccagg

SEQ ID NO: 4836 - DNA, 23 bp, Homo sapiens
ctcagcccctcctggcccccagg

SEQ ID NO: 4837 - DNA, 23 bp, Homo sapiens
ctcagccctgacccagctgaagg

SEQ ID NO: 4838 - DNA, 23 bp, Homo sapiens
ctcagccctgacccggctgaagg

SEQ ID NO: 4839 - DNA, 23 bp, Homo sapiens
ctcagccctgacctggctgaagg

SEQ ID NO: 4840 - DNA, 23 bp, Homo sapiens
ctcagctcctcctcgcccccagg

SEQ ID NO: 4841 - DNA, 23 bp, Homo sapiens
ctcaggagacgtgggacaggagg

SEQ ID NO: 4842 - DNA, 23 bp, Homo sapiens
ctcaggagggcgattggtccagg

SEQ ID NO: 4843 - DNA, 23 bp, Homo sapiens
ctcaggagggcggttggtccagg

SEQ ID NO: 4844 - DNA, 23 bp, Homo sapiens
ctcaggagggctattggtccagg

SEQ ID NO: 4845 - DNA, 23 bp, Homo sapiens
ctcaggctgcgtgtaagtgatgg

SEQ ID NO: 4846 - DNA, 23 bp, Homo sapiens
ctcaggctgcgtgtaagtggtgg

SEQ ID NO: 4847 - DNA, 23 bp, Homo sapiens
ctcagggaaagcagaagtcctgg

SEQ ID NO: 4848 - DNA, 23 bp, Homo sapiens
ctcagggtctcaggccccgaagg

SEQ ID NO: 4849 - DNA, 23 bp, Homo sapiens
ctcagggtctcaggctccaaggg

SEQ ID NO: 4850 - DNA, 23 bp, Homo sapiens
ctcagggtctcaggctccgaggg

SEQ ID NO: 4851 - DNA, 23 bp, Homo sapiens
ctcaggtagggaaggggtgaggg

SEQ ID NO: 4852 - DNA, 23 bp, Homo sapiens
ctcaggtggagaaggggtgaagg

SEQ ID NO: 4853 - DNA, 23 bp, Homo sapiens
ctcaggtggggaagggatgaagg

SEQ ID NO: 4854 - DNA, 23 bp, Homo sapiens
ctcaggtggggaaggggtgaagg

SEQ ID NO: 4855 - DNA, 23 bp, Homo sapiens
ctcaggttgcgtgtaagtgatgg

SEQ ID NO: 4856 - DNA, 23 bp, Homo sapiens
ctcagtgcaccatgaagttgagg

SEQ ID NO: 4857 - DNA, 23 bp, Homo sapiens
ctcatcccattctccattcaagg

SEQ ID NO: 4858 - DNA, 23 bp, Homo sapiens
ctcatcccccacggacggcccgg

SEQ ID NO: 4859 - DNA, 23 bp, Homo sapiens
ctcatcccccacggacgggccgg

SEQ ID NO: 4860 - DNA, 23 bp, Homo sapiens
ctcatgccattctccattcaagg

SEQ ID NO: 4861 - DNA, 23 bp, Homo sapiens
ctcatgctcaatgtgtttgaagg

SEQ ID NO: 4862 - DNA, 23 bp, Homo sapiens
ctcatggagtgggagactggggg

SEQ ID NO: 4863 - DNA, 23 bp, Homo sapiens
ctcatggagtgggagcctggggg

SEQ ID NO: 4864 - DNA, 23 bp, Homo sapiens
ctccacaagctccgtgtcctggg

SEQ ID NO: 4865 - DNA, 23 bp, Homo sapiens
ctccacaagctcggtgtcctggg

SEQ ID NO: 4866 - DNA, 23 bp, Homo sapiens
ctccacgagctccgtgtcctggg

SEQ ID NO: 4867 - DNA, 23 bp, Homo sapiens
ctccagcgatcacagctccaagg

SEQ ID NO: 4868 - DNA, 23 bp, Homo sapiens
ctccagtgatcacagctccaagg

SEQ ID NO: 4869 - DNA, 23 bp, Homo sapiens
ctcccaaacacaatatcccaagg

SEQ ID NO: 4870 - DNA, 23 bp, Homo sapiens
ctcccaaccacaatatcccaagg

SEQ ID NO: 4871 - DNA, 23 bp, Homo sapiens
ctcccagcgcaagtgggaggcgg

SEQ ID NO: 4872 - DNA, 23 bp, Homo sapiens
ctcccagcgcaagttggaggcgg

SEQ ID NO: 4873 - DNA, 23 bp, Homo sapiens
ctccccagacgccgagatgcggg

SEQ ID NO: 4874 - DNA, 23 bp, Homo sapiens
ctccccagaggccgagatgcggg

SEQ ID NO: 4875 - DNA, 23 bp, Homo sapiens
ctccccagggtagaagcccaggg

SEQ ID NO: 4876 - DNA, 23 bp, Homo sapiens
ctcccgagagcagcaggaggagg

SEQ ID NO: 4877 - DNA, 23 bp, Homo sapiens
ctcccgagagcagcaggatgagg

SEQ ID NO: 4878 - DNA, 23 bp, Homo sapiens
ctcccggggcaagggtctcgggg

SEQ ID NO: 4879 - DNA, 23 bp, Homo sapiens
ctcccgggtcaagggtctcgggg

SEQ ID NO: 4880 - DNA, 23 bp, Homo sapiens
ctcccgtagatctcccggcatgg

SEQ ID NO: 4881 - DNA, 23 bp, Homo sapiens
ctcccgtagatctcccgggatgg

SEQ ID NO: 4882 - DNA, 23 bp, Homo sapiens
ctccctcaggaccagagggaggg

SEQ ID NO: 4883 - DNA, 23 bp, Homo sapiens
ctccctcaggagcagagggaggg

SEQ ID NO: 4884 - DNA, 23 bp, Homo sapiens
ctccctccttaccccatctcagg

SEQ ID NO: 4885 - DNA, 23 bp, Homo sapiens
ctccctccttttccacctgtggg

SEQ ID NO: 4886 - DNA, 23 bp, Homo sapiens
ctccctccttttctaactgtggg

SEQ ID NO: 4887 - DNA, 23 bp, Homo sapiens
ctccctccttttctatctgtggg

SEQ ID NO: 4888 - DNA, 23 bp, Homo sapiens
ctccctctcccaacctacgtagg

SEQ ID NO: 4889 - DNA, 23 bp, Homo sapiens
ctccctctcccaacctatgtagg

SEQ ID NO: 4890 - DNA, 23 bp, Homo sapiens
ctccctctgccaacctatgtagg

SEQ ID NO: 4891 - DNA, 23 bp, Homo sapiens
ctccgatgaccacaactgctagg

SEQ ID NO: 4892 - DNA, 23 bp, Homo sapiens
ctccgcagacacctggagaacgg

SEQ ID NO: 4893 - DNA, 23 bp, Homo sapiens
ctccgcagatacctgaagaacgg

SEQ ID NO: 4894 - DNA, 23 bp, Homo sapiens
ctccgcagatacctgaagaatgg

SEQ ID NO: 4895 - DNA, 23 bp, Homo sapiens
ctccgcagatacctggagaacgg

SEQ ID NO: 4896 - DNA, 23 bp, Homo sapiens
ctccgcagggtagaaacccaggg

SEQ ID NO: 4897 - DNA, 23 bp, Homo sapiens
ctccgcagggtagaagcccaggg

SEQ ID NO: 4898 - DNA, 23 bp, Homo sapiens
ctccgcagggtagaagctcaggg

SEQ ID NO: 4899 - DNA, 23 bp, Homo sapiens
ctccgcggatacctggagaacgg

SEQ ID NO: 4900 - DNA, 23 bp, Homo sapiens
ctccggccgagggtctgggcggg

SEQ ID NO: 4901 - DNA, 23 bp, Homo sapiens
ctccggtcgagggtctgggcggg

SEQ ID NO: 4902 - DNA, 23 bp, Homo sapiens
ctccgtagggtagaagcccaggg

SEQ ID NO: 4903 - DNA, 23 bp, Homo sapiens
ctcctagtcttggacccaaaagg

SEQ ID NO: 4904 - DNA, 23 bp, Homo sapiens
ctcctatagatctcccgggatgg

SEQ ID NO: 4905 - DNA, 23 bp, Homo sapiens
ctcctataggtcgccggggatgg

SEQ ID NO: 4906 - DNA, 23 bp, Homo sapiens
ctcctcacattaggctaacaggg

SEQ ID NO: 4907 - DNA, 23 bp, Homo sapiens
ctcctcacattatgctaacaggg

SEQ ID NO: 4908 - DNA, 23 bp, Homo sapiens
ctcctcagacaccgagatgcggg

SEQ ID NO: 4909 - DNA, 23 bp, Homo sapiens
ctcctcagacgccaagatgctgg

SEQ ID NO: 4910 - DNA, 23 bp, Homo sapiens
ctcctcagacgccgagatgcggg

SEQ ID NO: 4911 - DNA, 23 bp, Homo sapiens
ctcctcagacgccgagatgctgg

SEQ ID NO: 4912 - DNA, 23 bp, Homo sapiens
ctcctccaggcgcggcttcccgg

SEQ ID NO: 4913 - DNA, 23 bp, Homo sapiens
ctcctcccagtcccctcataggg

SEQ ID NO: 4914 - DNA, 23 bp, Homo sapiens
ctcctcccggcgcggctacccgg

SEQ ID NO: 4915 - DNA, 23 bp, Homo sapiens
ctcctcccggcgcggctccccgg

SEQ ID NO: 4916 - DNA, 23 bp, Homo sapiens
ctcctcccggcgcggcttcccgg

SEQ ID NO: 4917 - DNA, 23 bp, Homo sapiens
ctcctccctgcgcggctccccgg

SEQ ID NO: 4918 - DNA, 23 bp, Homo sapiens
ctcctccctgtcccctcacaggg

SEQ ID NO: 4919 - DNA, 23 bp, Homo sapiens
ctcctcctgctgctctcgggagg

SEQ ID NO: 4920 - DNA, 23 bp, Homo sapiens
ctcctcgtcttggaaccaaaagg

SEQ ID NO: 4921 - DNA, 23 bp, Homo sapiens
ctcctcgtcttggacccaaaagg

SEQ ID NO: 4922 - DNA, 23 bp, Homo sapiens
ctcctcgtggaaggccatcccgg

SEQ ID NO: 4923 - DNA, 23 bp, Homo sapiens
ctcctcgtgggaggccatcccgg

SEQ ID NO: 4924 - DNA, 23 bp, Homo sapiens
ctcctcgtgggaggccatgccgg

SEQ ID NO: 4925 - DNA, 23 bp, Homo sapiens
ctcctggaccgccgcggacaagg

SEQ ID NO: 4926 - DNA, 23 bp, Homo sapiens
ctcctggaccgccgcggacacgg

SEQ ID NO: 4927 - DNA, 23 bp, Homo sapiens
ctcctggaccgcggcggacacgg

SEQ ID NO: 4928 - DNA, 23 bp, Homo sapiens
ctcctggaccgcggcggacatgg

SEQ ID NO: 4929 - DNA, 23 bp, Homo sapiens
ctcctggaccgctgcggacacgg

SEQ ID NO: 4930 - DNA, 23 bp, Homo sapiens
ctcctggactgccgcggacacgg

SEQ ID NO: 4931 - DNA, 23 bp, Homo sapiens
ctcctgtagatctcccgggatgg

SEQ ID NO: 4932 - DNA, 23 bp, Homo sapiens
ctcctgtcccacgtctcctgagg

SEQ ID NO: 4933 - DNA, 23 bp, Homo sapiens
ctcctgtcccacgtctcctgcgg

SEQ ID NO: 4934 - DNA, 23 bp, Homo sapiens
ctcctgtcccacgtctcctgtgg

SEQ ID NO: 4935 - DNA, 23 bp, Homo sapiens
ctccttggagctgtgatcactgg

SEQ ID NO: 4936 - DNA, 23 bp, Homo sapiens
ctccttggagctgtgatcgctgg

SEQ ID NO: 4937 - DNA, 23 bp, Homo sapiens
ctccttgtgggaggccagcccgg

SEQ ID NO: 4938 - DNA, 23 bp, Homo sapiens
ctcggagtcccgcggcttcgggg

SEQ ID NO: 4939 - DNA, 23 bp, Homo sapiens
ctcggggaggatctcagaccggg

SEQ ID NO: 4940 - DNA, 23 bp, Homo sapiens
ctcgggggacgggctgaccacgg

SEQ ID NO: 4941 - DNA, 23 bp, Homo sapiens
ctcggggtcccgcggcttcgggg

SEQ ID NO: 4942 - DNA, 23 bp, Homo sapiens
ctcggggtggatctcagacccgg

SEQ ID NO: 4943 - DNA, 23 bp, Homo sapiens
ctcggggtggatctcagaccggg

SEQ ID NO: 4944 - DNA, 23 bp, Homo sapiens
ctcggggtggatctcagacgggg

SEQ ID NO: 4945 - DNA, 23 bp, Homo sapiens
ctcgtggagaccaggcctgcagg

SEQ ID NO: 4946 - DNA, 23 bp, Homo sapiens
ctctagaacccgacacccaatgg

SEQ ID NO: 4947 - DNA, 23 bp, Homo sapiens
ctctagaatccgacacccaatgg

SEQ ID NO: 4948 - DNA, 23 bp, Homo sapiens
ctctcaactgctccgccacacgg

SEQ ID NO: 4949 - DNA, 23 bp, Homo sapiens
ctctcaactgctccgccacatgg

SEQ ID NO: 4950 - DNA, 23 bp, Homo sapiens
ctctcaactgctccgcccaacgg

SEQ ID NO: 4951 - DNA, 23 bp, Homo sapiens
ctctcaactgctccgcccgacgg

SEQ ID NO: 4952 - DNA, 23 bp, Homo sapiens
ctctcaactgctccgcctcatgg

SEQ ID NO: 4953 - DNA, 23 bp, Homo sapiens
ctctcagctgctccgccacacgg

SEQ ID NO: 4954 - DNA, 23 bp, Homo sapiens
ctctcagctgctccgcccgacgg

SEQ ID NO: 4955 - DNA, 23 bp, Homo sapiens
ctctcagctgctccgccgcacgg

SEQ ID NO: 4956 - DNA, 23 bp, Homo sapiens
ctctcagctgctccgccgtacgg

SEQ ID NO: 4957 - DNA, 23 bp, Homo sapiens
ctctcagctgctccgcctcacgg

SEQ ID NO: 4958 - DNA, 23 bp, Homo sapiens
ctctccactgctccgccacatgg

SEQ ID NO: 4959 - DNA, 23 bp, Homo sapiens
ctctccactgctccgccgcacgg

SEQ ID NO: 4960 - DNA, 23 bp, Homo sapiens
ctctccactgctccgcctcacgg

SEQ ID NO: 4961 - DNA, 23 bp, Homo sapiens
ctctccactgctccgcctcatgg

SEQ ID NO: 4962 - DNA, 23 bp, Homo sapiens
ctctccccatcccccacggacgg

SEQ ID NO: 4963 - DNA, 23 bp, Homo sapiens
ctctcccgggacaagggtctcgg

SEQ ID NO: 4964 - DNA, 23 bp, Homo sapiens
ctctcccggggcaagggtctcgg

SEQ ID NO: 4965 - DNA, 23 bp, Homo sapiens
ctctcccgggtcaagggtctcgg

SEQ ID NO: 4966 - DNA, 23 bp, Homo sapiens
ctctccgctgctccgccacacgg

SEQ ID NO: 4967 - DNA, 23 bp, Homo sapiens
ctctccgctgctccgccgcatgg

SEQ ID NO: 4968 - DNA, 23 bp, Homo sapiens
ctctccgctgctccgcctcacgg

SEQ ID NO: 4969 - DNA, 23 bp, Homo sapiens
ctctcgccggtcgagggtctggg

SEQ ID NO: 4970 - DNA, 23 bp, Homo sapiens
ctctcgccggtcgagggtttggg

SEQ ID NO: 4971 - DNA, 23 bp, Homo sapiens
ctctcggtaagtctgcgcggagg

SEQ ID NO: 4972 - DNA, 23 bp, Homo sapiens
ctctcggtaagtctgtgtgttgg

SEQ ID NO: 4973 - DNA, 23 bp, Homo sapiens
ctctcggtcagtctgtgactggg

SEQ ID NO: 4974 - DNA, 23 bp, Homo sapiens
ctctcggtcagtctgtgagtggg

SEQ ID NO: 4975 - DNA, 23 bp, Homo sapiens
ctctcggtcagtctgtgcctggg

SEQ ID NO: 4976 - DNA, 23 bp, Homo sapiens
ctctcggtcagtctgtgccttgg

SEQ ID NO: 4977 - DNA, 23 bp, Homo sapiens
ctctcggtcagtctgtgtgttgg

SEQ ID NO: 4978 - DNA, 23 bp, Homo sapiens
ctctctccggccgagggtctggg

SEQ ID NO: 4979 - DNA, 23 bp, Homo sapiens
ctctctccggtcgagggtctggg

SEQ ID NO: 4980 - DNA, 23 bp, Homo sapiens
ctctctgctgctccgccacatgg

SEQ ID NO: 4981 - DNA, 23 bp, Homo sapiens
ctctctgctgctccgccgcacgg

SEQ ID NO: 4982 - DNA, 23 bp, Homo sapiens
ctctctgctgctccgccgcatgg

SEQ ID NO: 4983 - DNA, 23 bp, Homo sapiens
ctctctggagacctttagcaggg

SEQ ID NO: 4984 - DNA, 23 bp, Homo sapiens
ctctgacctttagcagggtcagg

SEQ ID NO: 4985 - DNA, 23 bp, Homo sapiens
ctctgaggtccaagacttggagg

SEQ ID NO: 4986 - DNA, 23 bp, Homo sapiens
ctctgcagggtagaagcccaggg

SEQ ID NO: 4987 - DNA, 23 bp, Homo sapiens
ctctgccaagtgtgagaccctgg

SEQ ID NO: 4988 - DNA, 23 bp, Homo sapiens
ctctggaaggtgtgagaccctgg

SEQ ID NO: 4989 - DNA, 23 bp, Homo sapiens
ctctggacggtgtgagaacctgg

SEQ ID NO: 4990 - DNA, 23 bp, Homo sapiens
ctctggaggatgtgagaccctgg

SEQ ID NO: 4991 - DNA, 23 bp, Homo sapiens
ctctggagggtgtgagaacctgg

SEQ ID NO: 4992 - DNA, 23 bp, Homo sapiens
ctctggagggtgtgagaccctgg

SEQ ID NO: 4993 - DNA, 23 bp, Homo sapiens
ctctggatgatgtgagaccctgg

SEQ ID NO: 4994 - DNA, 23 bp, Homo sapiens
ctctggatggtgtgagaacctgg

SEQ ID NO: 4995 - DNA, 23 bp, Homo sapiens
ctctggatggtgtgagaccctgg

SEQ ID NO: 4996 - DNA, 23 bp, Homo sapiens
ctctggccctgacccagacctgg

SEQ ID NO: 4997 - DNA, 23 bp, Homo sapiens
ctctggggagaatgtgagtccgg

SEQ ID NO: 4998 - DNA, 23 bp, Homo sapiens
ctctggggtccaagactaggagg

SEQ ID NO: 4999 - DNA, 23 bp, Homo sapiens
ctctggggtccaaggctacgagg

SEQ ID NO: 5000 - DNA, 23 bp, Homo sapiens
ctctgggtctcaagctcccaggg

SEQ ID NO: 5001 - DNA, 23 bp, Homo sapiens
ctctgtcctgctccgccacacgg

SEQ ID NO: 5002 - DNA, 23 bp, Homo sapiens
ctctgtcctgctccgccgcacgg

SEQ ID NO: 5003 - DNA, 23 bp, Homo sapiens
ctcttctctctagacaattaagg

SEQ ID NO: 5004 - DNA, 23 bp, Homo sapiens
ctcttgaagtcacaaaggaaagg

SEQ ID NO: 5005 - DNA, 23 bp, Homo sapiens
ctcttgaagtcacaaaggagagg

SEQ ID NO: 5006 - DNA, 23 bp, Homo sapiens
ctcttgaagtcacaaaggggagg

SEQ ID NO: 5007 - DNA, 23 bp, Homo sapiens
ctcttggaccgcggcggacatgg

SEQ ID NO: 5008 - DNA, 23 bp, Homo sapiens
ctcttgggtccaagactaggagg

SEQ ID NO: 5009 - DNA, 23 bp, Homo sapiens
ctcttgtcccacatctcctgcgg

SEQ ID NO: 5010 - DNA, 23 bp, Homo sapiens
ctcttgtcccacatctcctgtgg

SEQ ID NO: 5011 - DNA, 23 bp, Homo sapiens
ctctttggagctatgttcgctgg

SEQ ID NO: 5012 - DNA, 23 bp, Homo sapiens
ctctttggagctgtgatcactgg

SEQ ID NO: 5013 - DNA, 23 bp, Homo sapiens
ctctttggagctgtgatcgctgg

SEQ ID NO: 5014 - DNA, 23 bp, Homo sapiens
ctctttggagctgtgttcgctgg

SEQ ID NO: 5015 - DNA, 23 bp, Homo sapiens
ctgaaaatgaaaccggctaaagg

SEQ ID NO: 5016 - DNA, 23 bp, Homo sapiens
ctgaaaatgaaaccgggtaaagg

SEQ ID NO: 5017 - DNA, 23 bp, Homo sapiens
ctgaaaatgaaaccgggttaagg

SEQ ID NO: 5018 - DNA, 23 bp, Homo sapiens
ctgaagcaactgccctcctaagg

SEQ ID NO: 5019 - DNA, 23 bp, Homo sapiens
ctgaccacgggggcggggccagg

SEQ ID NO: 5020 - DNA, 23 bp, Homo sapiens
ctgaccatgaagccaccctgagg

SEQ ID NO: 5021 - DNA, 23 bp, Homo sapiens
ctgaccatgaggccaccctgagg

SEQ ID NO: 5022 - DNA, 23 bp, Homo sapiens
ctgaccatgaggccactctgagg

SEQ ID NO: 5023 - DNA, 23 bp, Homo sapiens
ctgaccatgaggtcaccctgagg

SEQ ID NO: 5024 - DNA, 23 bp, Homo sapiens
ctgaccgcggggccggggccagg

SEQ ID NO: 5025 - DNA, 23 bp, Homo sapiens
ctgaccgcggggcctgggccagg

SEQ ID NO: 5026 - DNA, 23 bp, Homo sapiens
ctgaccgcgggggcggggccagg

SEQ ID NO: 5027 - DNA, 23 bp, Homo sapiens
ctgaccgcggggtccgggccagg

SEQ ID NO: 5028 - DNA, 23 bp, Homo sapiens
ctgaccgcggggtcggggccagg

SEQ ID NO: 5029 - DNA, 23 bp, Homo sapiens
ctgaccgtggggtcggggccagg

SEQ ID NO: 5030 - DNA, 23 bp, Homo sapiens
ctgacctcggggtccgggccagg

SEQ ID NO: 5031 - DNA, 23 bp, Homo sapiens
ctgacctgagtggaggccgaagg

SEQ ID NO: 5032 - DNA, 23 bp, Homo sapiens
ctgacctgagtggaggctgaagg

SEQ ID NO: 5033 - DNA, 23 bp, Homo sapiens
ctgacctgagtggaggctgaggg

SEQ ID NO: 5034 - DNA, 23 bp, Homo sapiens
ctgacctgagtggaggctgcagg

SEQ ID NO: 5035 - DNA, 23 bp, Homo sapiens
ctgacctgcgcccccggccgggg

SEQ ID NO: 5036 - DNA, 23 bp, Homo sapiens
ctgacgctcaatgtgtttgaagg

SEQ ID NO: 5037 - DNA, 23 bp, Homo sapiens
ctgagaacggacaggacacctgg

SEQ ID NO: 5038 - DNA, 23 bp, Homo sapiens
ctgagaatggacaggacacctgg

SEQ ID NO: 5039 - DNA, 23 bp, Homo sapiens
ctgagaatggacgggacacctgg

SEQ ID NO: 5040 - DNA, 23 bp, Homo sapiens
ctgagaatgggcaggacacctgg

SEQ ID NO: 5041 - DNA, 23 bp, Homo sapiens
ctgagacagctgtcttgtgaggg

SEQ ID NO: 5042 - DNA, 23 bp, Homo sapiens
ctgagccgccatgtccgccgcgg

SEQ ID NO: 5043 - DNA, 23 bp, Homo sapiens
ctgagccgccgtgtccgcagcgg

SEQ ID NO: 5044 - DNA, 23 bp, Homo sapiens
ctgagccgccgtgtccgccgcgg

SEQ ID NO: 5045 - DNA, 23 bp, Homo sapiens
ctgagccgccgtgtccgcggcgg

SEQ ID NO: 5046 - DNA, 23 bp, Homo sapiens
ctgagccgccttgtccgcggcgg

SEQ ID NO: 5047 - DNA, 23 bp, Homo sapiens
ctgagccgcggtgtccgccgcgg

SEQ ID NO: 5048 - DNA, 23 bp, Homo sapiens
ctgagccgcggtgtccgcggcgg

SEQ ID NO: 5049 - DNA, 23 bp, Homo sapiens
ctgagccgctgtgtccgcggcgg

SEQ ID NO: 5050 - DNA, 23 bp, Homo sapiens
ctgagctgccatgtccgccgcgg

SEQ ID NO: 5051 - DNA, 23 bp, Homo sapiens
ctgagggagaggaatcctcctgg

SEQ ID NO: 5052 - DNA, 23 bp, Homo sapiens
ctgaggtccttgggatattgtgg

SEQ ID NO: 5053 - DNA, 23 bp, Homo sapiens
ctgagtccgggtgggtgactggg

SEQ ID NO: 5054 - DNA, 23 bp, Homo sapiens
ctgagtccgggtgggtgcgtggg

SEQ ID NO: 5055 - DNA, 23 bp, Homo sapiens
ctgagttttcttgtcccactggg

SEQ ID NO: 5056 - DNA, 23 bp, Homo sapiens
ctgatcgcctatagatctcccgg

SEQ ID NO: 5057 - DNA, 23 bp, Homo sapiens
ctgatcgcctgtagatctcccgg

SEQ ID NO: 5058 - DNA, 23 bp, Homo sapiens
ctgatcgcctgtaggtctcccgg

SEQ ID NO: 5059 - DNA, 23 bp, Homo sapiens
ctgatgtgtgttgggtgttgggg

SEQ ID NO: 5060 - DNA, 23 bp, Homo sapiens
ctgcaacaggaaagatgattggg

SEQ ID NO: 5061 - DNA, 23 bp, Homo sapiens
ctgcacaaaagagtaagtgctgg

SEQ ID NO: 5062 - DNA, 23 bp, Homo sapiens
ctgcacaaaagagtaagttctgg

SEQ ID NO: 5063 - DNA, 23 bp, Homo sapiens
ctgcaccctgagatggagtaagg

SEQ ID NO: 5064 - DNA, 23 bp, Homo sapiens
ctgcagagatcacactgacctgg

SEQ ID NO: 5065 - DNA, 23 bp, Homo sapiens
ctgcagcctccactcaggtcagg

SEQ ID NO: 5066 - DNA, 23 bp, Homo sapiens
ctgcagcgcacgggtaccagggg

SEQ ID NO: 5067 - DNA, 23 bp, Homo sapiens
ctgcagcgcacgggtaccggggg

SEQ ID NO: 5068 - DNA, 23 bp, Homo sapiens
ctgcagcgcgcaggtaccagggg

SEQ ID NO: 5069 - DNA, 23 bp, Homo sapiens
ctgcagcgcgcgggtaccagggg

SEQ ID NO: 5070 - DNA, 23 bp, Homo sapiens
ctgcatcccagtaatgaggcagg

SEQ ID NO: 5071 - DNA, 23 bp, Homo sapiens
ctgccccccagagcagcaggagg

SEQ ID NO: 5072 - DNA, 23 bp, Homo sapiens
ctgcccggccccgaccaacccgg

SEQ ID NO: 5073 - DNA, 23 bp, Homo sapiens
ctgccgccggtgtgtgtcaaagg

SEQ ID NO: 5074 - DNA, 23 bp, Homo sapiens
ctgccttgtgtgggactgagagg

SEQ ID NO: 5075 - DNA, 23 bp, Homo sapiens
ctgcggagatcacactgacctgg

SEQ ID NO: 5076 - DNA, 23 bp, Homo sapiens
ctgcgtccaggctggtgtctggg

SEQ ID NO: 5077 - DNA, 23 bp, Homo sapiens
ctgcgtgtaagtgatggcagtgg

SEQ ID NO: 5078 - DNA, 23 bp, Homo sapiens
ctgcgtgtaagtgatggcggcgg

SEQ ID NO: 5079 - DNA, 23 bp, Homo sapiens
ctgcgtgtaagtgatggcggtgg

SEQ ID NO: 5080 - DNA, 23 bp, Homo sapiens
ctgcgtgtaagtgatgggggcgg

SEQ ID NO: 5081 - DNA, 23 bp, Homo sapiens
ctgcgtgtaagtgatgggggtgg

SEQ ID NO: 5082 - DNA, 23 bp, Homo sapiens
ctgcgtgtaagtggtgggggtgg

SEQ ID NO: 5083 - DNA, 23 bp, Homo sapiens
ctgctccacccacggcgcccggg

SEQ ID NO: 5084 - DNA, 23 bp, Homo sapiens
ctgctctatccacggcgcccggg

SEQ ID NO: 5085 - DNA, 23 bp, Homo sapiens
ctgctctatccatggcgcccagg

SEQ ID NO: 5086 - DNA, 23 bp, Homo sapiens
ctgctctatccatggcgcccggg

SEQ ID NO: 5087 - DNA, 23 bp, Homo sapiens
ctgctctctaggacaattaaggg

SEQ ID NO: 5088 - DNA, 23 bp, Homo sapiens
ctgctctctgacacaattaaggg

SEQ ID NO: 5089 - DNA, 23 bp, Homo sapiens
ctgctctctgactcaattaaggg

SEQ ID NO: 5090 - DNA, 23 bp, Homo sapiens
ctgctctgtgacacaattaaggg

SEQ ID NO: 5091 - DNA, 23 bp, Homo sapiens
ctgctgccggtgtgtgtcaaagg

SEQ ID NO: 5092 - DNA, 23 bp, Homo sapiens
ctgctgcctgtgtgtgtcaaagg

SEQ ID NO: 5093 - DNA, 23 bp, Homo sapiens
ctgcttcccagtaatgaggcagg

SEQ ID NO: 5094 - DNA, 23 bp, Homo sapiens
ctgcttcccagtaatgatgcagg

SEQ ID NO: 5095 - DNA, 23 bp, Homo sapiens
ctggaaacccgacacccaatggg

SEQ ID NO: 5096 - DNA, 23 bp, Homo sapiens
ctggaacaggaaagatgattggg

SEQ ID NO: 5097 - DNA, 23 bp, Homo sapiens
ctggaagaaggacccgacacagg

SEQ ID NO: 5098 - DNA, 23 bp, Homo sapiens
ctggaagaaggacccgacatagg

SEQ ID NO: 5099 - DNA, 23 bp, Homo sapiens
ctggaagcaccatccacacatgg

SEQ ID NO: 5100 - DNA, 23 bp, Homo sapiens
ctggaagcaccatccacacctgg

SEQ ID NO: 5101 - DNA, 23 bp, Homo sapiens
ctggaagcaccatccacacgtgg

SEQ ID NO: 5102 - DNA, 23 bp, Homo sapiens
ctggaccaaccgccctcctgagg

SEQ ID NO: 5103 - DNA, 23 bp, Homo sapiens
ctggaccaactgccctcctaagg

SEQ ID NO: 5104 - DNA, 23 bp, Homo sapiens
ctggaccaactgctctcctaagg

SEQ ID NO: 5105 - DNA, 23 bp, Homo sapiens
ctggaccaatagccctcctgagg

SEQ ID NO: 5106 - DNA, 23 bp, Homo sapiens
ctggaccgccgcggacaaggcgg

SEQ ID NO: 5107 - DNA, 23 bp, Homo sapiens
ctggaccgccgcggacacagcgg

SEQ ID NO: 5108 - DNA, 23 bp, Homo sapiens
ctggaccgccgcggacaccgcgg

SEQ ID NO: 5109 - DNA, 23 bp, Homo sapiens
ctggaccgccgcggacacggcgg

SEQ ID NO: 5110 - DNA, 23 bp, Homo sapiens
ctggaccgcggcggacaccgcgg

SEQ ID NO: 5111 - DNA, 23 bp, Homo sapiens
ctggaccgcggcggacacggcgg

SEQ ID NO: 5112 - DNA, 23 bp, Homo sapiens
ctggaccgctgcggacacggcgg

SEQ ID NO: 5113 - DNA, 23 bp, Homo sapiens
ctggactgccgcggacacggcgg

SEQ ID NO: 5114 - DNA, 23 bp, Homo sapiens
ctggagcaactgccctcctaagg

SEQ ID NO: 5115 - DNA, 23 bp, Homo sapiens
ctggagcgcgcgggtaccagggg

SEQ ID NO: 5116 - DNA, 23 bp, Homo sapiens
ctggagcgcgctggtaccagggg

SEQ ID NO: 5117 - DNA, 23 bp, Homo sapiens
ctggagggcacgtgcgtggacgg

SEQ ID NO: 5118 - DNA, 23 bp, Homo sapiens
ctggagggccggtgcgtggacgg

SEQ ID NO: 5119 - DNA, 23 bp, Homo sapiens
ctggagggcctgatgtgtgttgg

SEQ ID NO: 5120 - DNA, 23 bp, Homo sapiens
ctggagggcgagtgcgtggacgg

SEQ ID NO: 5121 - DNA, 23 bp, Homo sapiens
ctggcacacagggcccagactgg

SEQ ID NO: 5122 - DNA, 23 bp, Homo sapiens
ctggcacacagggcccaggctgg

SEQ ID NO: 5123 - DNA, 23 bp, Homo sapiens
ctggcgggggcgcaagacccggg

SEQ ID NO: 5124 - DNA, 23 bp, Homo sapiens
ctggcgggggcgcaggacccggg

SEQ ID NO: 5125 - DNA, 23 bp, Homo sapiens
ctggcgggggcgcaggaccgggg

SEQ ID NO: 5126 - DNA, 23 bp, Homo sapiens
ctggctgtcctagctgtcctagg

SEQ ID NO: 5127 - DNA, 23 bp, Homo sapiens
ctgggaagcagcatccacacagg

SEQ ID NO: 5128 - DNA, 23 bp, Homo sapiens
ctgggaagcagcatcctcacagg

SEQ ID NO: 5129 - DNA, 23 bp, Homo sapiens
ctgggaagcagcatgcacacagg

SEQ ID NO: 5130 - DNA, 23 bp, Homo sapiens
ctgggagctgaagtggtcggggg

SEQ ID NO: 5131 - DNA, 23 bp, Homo sapiens
ctgggatgcagcatccacacagg

SEQ ID NO: 5132 - DNA, 23 bp, Homo sapiens
ctgggcactgtcactgcctgggg

SEQ ID NO: 5133 - DNA, 23 bp, Homo sapiens
ctgggcactgttgctgcctgggg

SEQ ID NO: 5134 - DNA, 23 bp, Homo sapiens
ctgggcactgttgctggctgggg

SEQ ID NO: 5135 - DNA, 23 bp, Homo sapiens
ctgggccagggtctcacacttgg

SEQ ID NO: 5136 - DNA, 23 bp, Homo sapiens
ctgggccggtgagtgcgggtcgg

SEQ ID NO: 5137 - DNA, 23 bp, Homo sapiens
ctgggcctctcccgggacaaggg

SEQ ID NO: 5138 - DNA, 23 bp, Homo sapiens
ctgggcctctcccggggcaaggg

SEQ ID NO: 5139 - DNA, 23 bp, Homo sapiens
ctgggcctctcccgggtcaaggg

SEQ ID NO: 5140 - DNA, 23 bp, Homo sapiens
ctgggcgccatggatagagcagg

SEQ ID NO: 5141 - DNA, 23 bp, Homo sapiens
ctgggcggattccgcagcctcgg

SEQ ID NO: 5142 - DNA, 23 bp, Homo sapiens
ctgggcggggctcgggggactgg

SEQ ID NO: 5143 - DNA, 23 bp, Homo sapiens
ctgggcgggtcccgcggcctcgg

SEQ ID NO: 5144 - DNA, 23 bp, Homo sapiens
ctgggcgggttccgcagcctcgg

SEQ ID NO: 5145 - DNA, 23 bp, Homo sapiens
ctgggctgaccgcggggccgggg

SEQ ID NO: 5146 - DNA, 23 bp, Homo sapiens
ctgggctgaccgcgggggcgggg

SEQ ID NO: 5147 - DNA, 23 bp, Homo sapiens
ctgggctgaccgcggggtcgggg

SEQ ID NO: 5148 - DNA, 23 bp, Homo sapiens
ctgggctgaccgtggggtcgggg

SEQ ID NO: 5149 - DNA, 23 bp, Homo sapiens
ctggggagatcacactgacctgg

SEQ ID NO: 5150 - DNA, 23 bp, Homo sapiens
ctggggagctgaagtggtcgggg

SEQ ID NO: 5151 - DNA, 23 bp, Homo sapiens
ctggggagctgaagtggtctggg

SEQ ID NO: 5152 - DNA, 23 bp, Homo sapiens
ctggggcggggctcgcgggacgg

SEQ ID NO: 5153 - DNA, 23 bp, Homo sapiens
ctggggcggggctcgggggacgg

SEQ ID NO: 5154 - DNA, 23 bp, Homo sapiens
ctggggcggggtggggcagaggg

SEQ ID NO: 5155 - DNA, 23 bp, Homo sapiens
ctggggctctcgccggtcgaggg

SEQ ID NO: 5156 - DNA, 23 bp, Homo sapiens
ctggggctctctccggccgaggg

SEQ ID NO: 5157 - DNA, 23 bp, Homo sapiens
ctggggctctctccggtcgaggg

SEQ ID NO: 5158 - DNA, 23 bp, Homo sapiens
ctggggcttgaaacccccagtgg

SEQ ID NO: 5159 - DNA, 23 bp, Homo sapiens
ctggggcttgaaactcccagtgg

SEQ ID NO: 5160 - DNA, 23 bp, Homo sapiens
ctgggggtgggtggggcagaggg

SEQ ID NO: 5161 - DNA, 23 bp, Homo sapiens
ctgggggtgggtggggcagtggg

SEQ ID NO: 5162 - DNA, 23 bp, Homo sapiens
ctggggtaaggaggggaatgggg

SEQ ID NO: 5163 - DNA, 23 bp, Homo sapiens
ctgggtaggcccataattgtggg

SEQ ID NO: 5164 - DNA, 23 bp, Homo sapiens
ctgggtcagggctgaggcttggg

SEQ ID NO: 5165 - DNA, 23 bp, Homo sapiens
ctgggtgggcccatgattgtggg

SEQ ID NO: 5166 - DNA, 23 bp, Homo sapiens
ctgggttttcttgtcccactggg

SEQ ID NO: 5167 - DNA, 23 bp, Homo sapiens
ctgggttttcttgttccactggg

SEQ ID NO: 5168 - DNA, 23 bp, Homo sapiens
ctggtcacatgggtggtcctagg

SEQ ID NO: 5169 - DNA, 23 bp, Homo sapiens
ctggtgagtgcggggtcggcagg

SEQ ID NO: 5170 - DNA, 23 bp, Homo sapiens
ctggtgagtgcggggtcgggagg

SEQ ID NO: 5171 - DNA, 23 bp, Homo sapiens
ctggttgtagtagccgcgcaggg

SEQ ID NO: 5172 - DNA, 23 bp, Homo sapiens
ctggttgtagtagcggagcaggg

SEQ ID NO: 5173 - DNA, 23 bp, Homo sapiens
ctggttgtagtagcggagcgcgg

SEQ ID NO: 5174 - DNA, 23 bp, Homo sapiens
ctggttgtcctagctgtccttgg

SEQ ID NO: 5175 - DNA, 23 bp, Homo sapiens
ctgtgagtgcgaggttgggaggg

SEQ ID NO: 5176 - DNA, 23 bp, Homo sapiens
ctgtgagtgcggggttaggaggg

SEQ ID NO: 5177 - DNA, 23 bp, Homo sapiens
ctgtgagtgcggggttgggaggg

SEQ ID NO: 5178 - DNA, 23 bp, Homo sapiens
ctgtgccccttccccacaccagg

SEQ ID NO: 5179 - DNA, 23 bp, Homo sapiens
ctgtgccccttccccaccccagg

SEQ ID NO: 5180 - DNA, 23 bp, Homo sapiens
ctgtgctctcttccccatcccgg

SEQ ID NO: 5181 - DNA, 23 bp, Homo sapiens
ctgtggagatcacactgacctgg

SEQ ID NO: 5182 - DNA, 23 bp, Homo sapiens
ctgtggtcgctgccgtgatgtgg

SEQ ID NO: 5183 - DNA, 23 bp, Homo sapiens
ctgtggtcgctgctgtgaggtgg

SEQ ID NO: 5184 - DNA, 23 bp, Homo sapiens
ctgtggtcgctgctgtgatgtgg

SEQ ID NO: 5185 - DNA, 23 bp, Homo sapiens
ctgtgtccaggctggcgtctggg

SEQ ID NO: 5186 - DNA, 23 bp, Homo sapiens
ctgtgtccaggctggtgtctggg

SEQ ID NO: 5187 - DNA, 23 bp, Homo sapiens
ctgtgtcccggcccggccgcggg

SEQ ID NO: 5188 - DNA, 23 bp, Homo sapiens
ctgtgtcccttccccaccccagg

SEQ ID NO: 5189 - DNA, 23 bp, Homo sapiens
ctgtgtcgggtccttcttccagg

SEQ ID NO: 5190 - DNA, 23 bp, Homo sapiens
cttaattgagtcagagagcaggg

SEQ ID NO: 5191 - DNA, 23 bp, Homo sapiens
cttaattgtctagagagaagagg

SEQ ID NO: 5192 - DNA, 23 bp, Homo sapiens
cttaattgtgtcacagagcaggg

SEQ ID NO: 5193 - DNA, 23 bp, Homo sapiens
cttaattgtgtcagagagcaggg

SEQ ID NO: 5194 - DNA, 23 bp, Homo sapiens
cttaccccagctcagggtgaggg

SEQ ID NO: 5195 - DNA, 23 bp, Homo sapiens
cttaccccatctcagggtgaggg

SEQ ID NO: 5196 - DNA, 23 bp, Homo sapiens
cttactccatctcagggtgaggg

SEQ ID NO: 5197 - DNA, 23 bp, Homo sapiens
cttactccatctcagggtgcagg

SEQ ID NO: 5198 - DNA, 23 bp, Homo sapiens
cttaggagagcagttggtccagg

SEQ ID NO: 5199 - DNA, 23 bp, Homo sapiens
cttaggagggcagttgcttcagg

SEQ ID NO: 5200 - DNA, 23 bp, Homo sapiens
cttaggagggcagttggtccagg

SEQ ID NO: 5201 - DNA, 23 bp, Homo sapiens
cttcaaacacattgagcatgagg

SEQ ID NO: 5202 - DNA, 23 bp, Homo sapiens
cttcaaacacattgagcgtcagg

SEQ ID NO: 5203 - DNA, 23 bp, Homo sapiens
cttcaaacacattgagcgtgagg

SEQ ID NO: 5204 - DNA, 23 bp, Homo sapiens
cttcacaaaagagtaagtgctgg

SEQ ID NO: 5205 - DNA, 23 bp, Homo sapiens
cttcacaacagagtaagtgctgg

SEQ ID NO: 5206 - DNA, 23 bp, Homo sapiens
cttcacactcaatatgtgtgggg

SEQ ID NO: 5207 - DNA, 23 bp, Homo sapiens
cttcacactcaatgtgtgtgggg

SEQ ID NO: 5208 - DNA, 23 bp, Homo sapiens
cttcagacacattgagtgtgagg

SEQ ID NO: 5209 - DNA, 23 bp, Homo sapiens
cttcagccaggtcagggctgagg

SEQ ID NO: 5210 - DNA, 23 bp, Homo sapiens
cttcagccgggtcagggctgagg

SEQ ID NO: 5211 - DNA, 23 bp, Homo sapiens
cttcagcctccactcaggtcagg

SEQ ID NO: 5212 - DNA, 23 bp, Homo sapiens
cttcagctgggtcagggctgagg

SEQ ID NO: 5213 - DNA, 23 bp, Homo sapiens
cttcatatctgtcacagtgaggg

SEQ ID NO: 5214 - DNA, 23 bp, Homo sapiens
cttcatcaccgtgggctacgtgg

SEQ ID NO: 5215 - DNA, 23 bp, Homo sapiens
cttcatcgcagtgggctacgtgg

SEQ ID NO: 5216 - DNA, 23 bp, Homo sapiens
cttcatcgccgtgggctacgtgg

SEQ ID NO: 5217 - DNA, 23 bp, Homo sapiens
cttcatctcagtgggctacgtgg

SEQ ID NO: 5218 - DNA, 23 bp, Homo sapiens
cttcatggagtgggagcctgggg

SEQ ID NO: 5219 - DNA, 23 bp, Homo sapiens
cttcatggtcagagacagcgtgg

SEQ ID NO: 5220 - DNA, 23 bp, Homo sapiens
cttcattgcagtgggctacgtgg

SEQ ID NO: 5221 - DNA, 23 bp, Homo sapiens
cttccagaagtggacagctgtgg

SEQ ID NO: 5222 - DNA, 23 bp, Homo sapiens
cttccagaagtgggcagctgtgg

SEQ ID NO: 5223 - DNA, 23 bp, Homo sapiens
cttccagaagtgggcggctgtgg

SEQ ID NO: 5224 - DNA, 23 bp, Homo sapiens
cttccagaagtgggcgtctgtgg

SEQ ID NO: 5225 - DNA, 23 bp, Homo sapiens
cttccagaagtgggtggctgtgg

SEQ ID NO: 5226 - DNA, 23 bp, Homo sapiens
cttcccacagatagaaaaggagg

SEQ ID NO: 5227 - DNA, 23 bp, Homo sapiens
cttcccacaggtggaaaaggagg

SEQ ID NO: 5228 - DNA, 23 bp, Homo sapiens
cttcccacagttagaaaaggagg

SEQ ID NO: 5229 - DNA, 23 bp, Homo sapiens
cttcctcccagtcccctcacagg

SEQ ID NO: 5230 - DNA, 23 bp, Homo sapiens
cttcctcccagtgccctcacagg

SEQ ID NO: 5231 - DNA, 23 bp, Homo sapiens
cttcctccgcgggtaccagcagg

SEQ ID NO: 5232 - DNA, 23 bp, Homo sapiens
cttcctccgcgggtaccggcagg

SEQ ID NO: 5233 - DNA, 23 bp, Homo sapiens
cttcctcctacacatcatagcgg

SEQ ID NO: 5234 - DNA, 23 bp, Homo sapiens
cttcctggatactcacgacgcgg

SEQ ID NO: 5235 - DNA, 23 bp, Homo sapiens
cttcggcctccactcaggtcagg

SEQ ID NO: 5236 - DNA, 23 bp, Homo sapiens
cttctcacagatagaaaaggagg

SEQ ID NO: 5237 - DNA, 23 bp, Homo sapiens
cttctctctaggacaattaaggg

SEQ ID NO: 5238 - DNA, 23 bp, Homo sapiens
cttctctgaggtccaagacttgg

SEQ ID NO: 5239 - DNA, 23 bp, Homo sapiens
cttctctggggtccaagactagg

SEQ ID NO: 5240 - DNA, 23 bp, Homo sapiens
cttctcttgggtccaagactagg

SEQ ID NO: 5241 - DNA, 23 bp, Homo sapiens
cttcttctcccaacctatgtcgg

SEQ ID NO: 5242 - DNA, 23 bp, Homo sapiens
cttcttctcccaacctgcgacgg

SEQ ID NO: 5243 - DNA, 23 bp, Homo sapiens
cttcttctcccaacctgcgtcgg

SEQ ID NO: 5244 - DNA, 23 bp, Homo sapiens
cttcttctcccaacctgtgtcgg

SEQ ID NO: 5245 - DNA, 23 bp, Homo sapiens
cttcttctcccaacttgtgtcgg

SEQ ID NO: 5246 - DNA, 23 bp, Homo sapiens
cttcttcttccaacctgcgtcgg

SEQ ID NO: 5247 - DNA, 23 bp, Homo sapiens
cttgaaaaggtgagattcttggg

SEQ ID NO: 5248 - DNA, 23 bp, Homo sapiens
cttgctctatccacggcgcccgg

SEQ ID NO: 5249 - DNA, 23 bp, Homo sapiens
cttgctggcctggttctctttgg

SEQ ID NO: 5250 - DNA, 23 bp, Homo sapiens
cttgcttctccccgcagaggcgg

SEQ ID NO: 5251 - DNA, 23 bp, Homo sapiens
cttggggtctagagtgggcgggg

SEQ ID NO: 5252 - DNA, 23 bp, Homo sapiens
cttggggtctagagtgggtgggg

SEQ ID NO: 5253 - DNA, 23 bp, Homo sapiens
cttggggtggatctcagacgggg

SEQ ID NO: 5254 - DNA, 23 bp, Homo sapiens
cttgtaaaggtgagattctgggg

SEQ ID NO: 5255 - DNA, 23 bp, Homo sapiens
cttgtaggcataatgtgaggagg

SEQ ID NO: 5256 - DNA, 23 bp, Homo sapiens
cttgtgagggaccgagatgcagg

SEQ ID NO: 5257 - DNA, 23 bp, Homo sapiens
cttgtgagggactgagatgcagg

SEQ ID NO: 5258 - DNA, 23 bp, Homo sapiens
cttgtggagaccagaccagcagg

SEQ ID NO: 5259 - DNA, 23 bp, Homo sapiens
cttgtggagaccaggccagcagg

SEQ ID NO: 5260 - DNA, 23 bp, Homo sapiens
cttgtggagaccaggcctgcagg

SEQ ID NO: 5261 - DNA, 23 bp, Homo sapiens
ctttaaacacattgagcgtgagg

SEQ ID NO: 5262 - DNA, 23 bp, Homo sapiens
ctttacaaaagagtaagtgctgg

SEQ ID NO: 5263 - DNA, 23 bp, Homo sapiens
ctttcctgttccagagaggtggg

SEQ ID NO: 5264 - DNA, 23 bp, Homo sapiens
ctttcctgttgcagagaggtggg

SEQ ID NO: 5265 - DNA, 23 bp, Homo sapiens
ctttgccgtcgtaggcgtactgg

SEQ ID NO: 5266 - DNA, 23 bp, Homo sapiens
cttttgggtccaagacgaggagg

SEQ ID NO: 5267 - DNA, 23 bp, Homo sapiens
cttttgggtccaagactaggagg

SEQ ID NO: 5268 - DNA, 23 bp, Homo sapiens
cttttggttccaagacgaggagg

SEQ ID NO: 5269 - DNA, 23 bp, Homo sapiens
ctttttttttgttctaccccagg

SEQ ID NO: 5270 - DNA, 23 bp, Homo sapiens
gaaaagaaactgcggagttgggg

SEQ ID NO: 5271 - DNA, 23 bp, Homo sapiens
gaaaattctagtccctgaagagg

SEQ ID NO: 5272 - DNA, 23 bp, Homo sapiens
gaaaccggctaaaggcgcctggg

SEQ ID NO: 5273 - DNA, 23 bp, Homo sapiens
gaaaccgggtaaacgcgcctggg

SEQ ID NO: 5274 - DNA, 23 bp, Homo sapiens
gaaaccgggtaaaggcgactagg

SEQ ID NO: 5275 - DNA, 23 bp, Homo sapiens
gaaaccgggtaaaggcgactggg

SEQ ID NO: 5276 - DNA, 23 bp, Homo sapiens
gaaaccgggtaaaggcgcctggg

SEQ ID NO: 5277 - DNA, 23 bp, Homo sapiens
gaaaccgggtaaaggtgactggg

SEQ ID NO: 5278 - DNA, 23 bp, Homo sapiens
gaaaccgggttaaggcgcctggg

SEQ ID NO: 5279 - DNA, 23 bp, Homo sapiens
gaaactcaggggagtgggagtgg

SEQ ID NO: 5280 - DNA, 23 bp, Homo sapiens
gaaagcaggagcccttcagcagg

SEQ ID NO: 5281 - DNA, 23 bp, Homo sapiens
gaaagttcgagtctctgagcggg

SEQ ID NO: 5282 - DNA, 23 bp, Homo sapiens
gaaagttcgagtctctgagtggg

SEQ ID NO: 5283 - DNA, 23 bp, Homo sapiens
gaacaaattcaggtcagtcatgg

SEQ ID NO: 5284 - DNA, 23 bp, Homo sapiens
gaacaaattctggtgagtcatgg

SEQ ID NO: 5285 - DNA, 23 bp, Homo sapiens
gaacaaattctggttagtcatgg

SEQ ID NO: 5286 - DNA, 23 bp, Homo sapiens
gaacagctcaggtggagaagggg

SEQ ID NO: 5287 - DNA, 23 bp, Homo sapiens
gaaccactcatcagtattcgagg

SEQ ID NO: 5288 - DNA, 23 bp, Homo sapiens
gaaccagtcatcagtattcgagg

SEQ ID NO: 5289 - DNA, 23 bp, Homo sapiens
gaaccatgacttttcctctcagg

SEQ ID NO: 5290 - DNA, 23 bp, Homo sapiens
gaaccatgacttttcttctcagg

SEQ ID NO: 5291 - DNA, 23 bp, Homo sapiens
gaaccctcctcctgctgctctgg

SEQ ID NO: 5292 - DNA, 23 bp, Homo sapiens
gaaccgtcctcctgctgctctgg

SEQ ID NO: 5293 - DNA, 23 bp, Homo sapiens
gaaccgtgacttttcctctcagg

SEQ ID NO: 5294 - DNA, 23 bp, Homo sapiens
gaactacaagcgccaggcacagg

SEQ ID NO: 5295 - DNA, 23 bp, Homo sapiens
gaactacgactgcagacccaggg

SEQ ID NO: 5296 - DNA, 23 bp, Homo sapiens
gaactatgactgcagacccaggg

SEQ ID NO: 5297 - DNA, 23 bp, Homo sapiens
gaagaaatacctcatggagtggg

SEQ ID NO: 5298 - DNA, 23 bp, Homo sapiens
gaagaaatacttcatggagtggg

SEQ ID NO: 5299 - DNA, 23 bp, Homo sapiens
gaagaagaagtgaaactcagggg

SEQ ID NO: 5300 - DNA, 23 bp, Homo sapiens
gaagaagacgctgcagcgcgcgg

SEQ ID NO: 5301 - DNA, 23 bp, Homo sapiens
gaagacagctctgggaaaagagg

SEQ ID NO: 5302 - DNA, 23 bp, Homo sapiens
gaagacggctctgggaaaagagg

SEQ ID NO: 5303 - DNA, 23 bp, Homo sapiens
gaagacggctctgggaaaggagg

SEQ ID NO: 5304 - DNA, 23 bp, Homo sapiens
gaagagctcaggtagggaagggg

SEQ ID NO: 5305 - DNA, 23 bp, Homo sapiens
gaagagctcaggtggagaagggg

SEQ ID NO: 5306 - DNA, 23 bp, Homo sapiens
gaagagctcaggtggggaagggg

SEQ ID NO: 5307 - DNA, 23 bp, Homo sapiens
gaagagctcaggtggggtgaagg

SEQ ID NO: 5308 - DNA, 23 bp, Homo sapiens
gaagagggaacagcgacttctgg

SEQ ID NO: 5309 - DNA, 23 bp, Homo sapiens
gaagagggtcatggtggacatgg

SEQ ID NO: 5310 - DNA, 23 bp, Homo sapiens
gaagagttcaggtagggaagggg

SEQ ID NO: 5311 - DNA, 23 bp, Homo sapiens
gaagatggccctgggaaaggagg

SEQ ID NO: 5312 - DNA, 23 bp, Homo sapiens
gaagatggctctgggaaaagagg

SEQ ID NO: 5313 - DNA, 23 bp, Homo sapiens
gaagatggctctgggaaaggagg

SEQ ID NO: 5314 - DNA, 23 bp, Homo sapiens
gaagcaacgggcccgcctggcgg

SEQ ID NO: 5315 - DNA, 23 bp, Homo sapiens
gaagcaaggggcccgcccggcgg

SEQ ID NO: 5316 - DNA, 23 bp, Homo sapiens
gaagcaaggggcccgcctggcgg

SEQ ID NO: 5317 - DNA, 23 bp, Homo sapiens
gaagcaaggggccctcctggcgg

SEQ ID NO: 5318 - DNA, 23 bp, Homo sapiens
gaagcaccacccacaatcatggg

SEQ ID NO: 5319 - DNA, 23 bp, Homo sapiens
gaagcaccacccacaattatggg

SEQ ID NO: 5320 - DNA, 23 bp, Homo sapiens
gaagcaccatccacaatcatggg

SEQ ID NO: 5321 - DNA, 23 bp, Homo sapiens
gaagcaccatccacaattatggg

SEQ ID NO: 5322 - DNA, 23 bp, Homo sapiens
gaagcaccgtccacaatcatggg

SEQ ID NO: 5323 - DNA, 23 bp, Homo sapiens
gaagcaccttccacaatcatggg

SEQ ID NO: 5324 - DNA, 23 bp, Homo sapiens
gaagccaatcagcgtcgccgcgg

SEQ ID NO: 5325 - DNA, 23 bp, Homo sapiens
gaagccaatcagcgtcgccgggg

SEQ ID NO: 5326 - DNA, 23 bp, Homo sapiens
gaagccaatcagcgtcgccgtgg

SEQ ID NO: 5327 - DNA, 23 bp, Homo sapiens
gaagccaatcagtgtcgccgggg

SEQ ID NO: 5328 - DNA, 23 bp, Homo sapiens
gaagccaatcagtgtcgtcgcgg

SEQ ID NO: 5329 - DNA, 23 bp, Homo sapiens
gaagccaatcagtgtcttcgcgg

SEQ ID NO: 5330 - DNA, 23 bp, Homo sapiens
gaagccccgcttcatcgccgtgg

SEQ ID NO: 5331 - DNA, 23 bp, Homo sapiens
gaagcccctcaccctgagatggg

SEQ ID NO: 5332 - DNA, 23 bp, Homo sapiens
gaagcggggctccccgcggccgg

SEQ ID NO: 5333 - DNA, 23 bp, Homo sapiens
gaagcggggctctccactgccgg

SEQ ID NO: 5334 - DNA, 23 bp, Homo sapiens
gaagcggggctctccgcggccgg

SEQ ID NO: 5335 - DNA, 23 bp, Homo sapiens
gaagcggggcttcccgcggccgg

SEQ ID NO: 5336 - DNA, 23 bp, Homo sapiens
gaaggacacgctggagcgcgcgg

SEQ ID NO: 5337 - DNA, 23 bp, Homo sapiens
gaaggacggatgtatcaccttgg

SEQ ID NO: 5338 - DNA, 23 bp, Homo sapiens
gaaggagacgctgcagcgcacgg

SEQ ID NO: 5339 - DNA, 23 bp, Homo sapiens
gaaggagacgctgcagcgcgcgg

SEQ ID NO: 5340 - DNA, 23 bp, Homo sapiens
gaaggtccctgaggaccttcagg

SEQ ID NO: 5341 - DNA, 23 bp, Homo sapiens
gaagtacaagcgccaggcacagg

SEQ ID NO: 5342 - DNA, 23 bp, Homo sapiens
gaagtatgactacagacccaagg

SEQ ID NO: 5343 - DNA, 23 bp, Homo sapiens
gaagtatgactacagacccaggg

SEQ ID NO: 5344 - DNA, 23 bp, Homo sapiens
gaagtcccaggccccgggcgggg

SEQ ID NO: 5345 - DNA, 23 bp, Homo sapiens
gaagtcccaggtcccggacgggg

SEQ ID NO: 5346 - DNA, 23 bp, Homo sapiens
gaagtcccaggtcccgggcgggg

SEQ ID NO: 5347 - DNA, 23 bp, Homo sapiens
gaagtcccatgtcccggacgggg

SEQ ID NO: 5348 - DNA, 23 bp, Homo sapiens
gaagtccccagtcacccacccgg

SEQ ID NO: 5349 - DNA, 23 bp, Homo sapiens
gaagtccctgaggaaatggaggg

SEQ ID NO: 5350 - DNA, 23 bp, Homo sapiens
gaagtccttgaggaaatggaggg

SEQ ID NO: 5351 - DNA, 23 bp, Homo sapiens
gaagtcgctgttccctcctcagg

SEQ ID NO: 5352 - DNA, 23 bp, Homo sapiens
gaagtcgctgttccctcttcagg

SEQ ID NO: 5353 - DNA, 23 bp, Homo sapiens
gaagtcgctgttcccttctcagg

SEQ ID NO: 5354 - DNA, 23 bp, Homo sapiens
gaagtctctgaggaaatggaggg

SEQ ID NO: 5355 - DNA, 23 bp, Homo sapiens
gaagtgaaactcaggggagtggg

SEQ ID NO: 5356 - DNA, 23 bp, Homo sapiens
gaagtgaaactcgtgggagtggg

SEQ ID NO: 5357 - DNA, 23 bp, Homo sapiens
gaagtggggctccccgcggccgg

SEQ ID NO: 5358 - DNA, 23 bp, Homo sapiens
gaagtggggctctccgcggccgg

SEQ ID NO: 5359 - DNA, 23 bp, Homo sapiens
gaagtggggctctccgcggctgg

SEQ ID NO: 5360 - DNA, 23 bp, Homo sapiens
gaatatcgccctcccttgaatgg

SEQ ID NO: 5361 - DNA, 23 bp, Homo sapiens
gaatatgtatggctgcgacgtgg

SEQ ID NO: 5362 - DNA, 23 bp, Homo sapiens
gaatgacgtctctgaggaaatgg

SEQ ID NO: 5363 - DNA, 23 bp, Homo sapiens
gaatgtcgccctcccttgaatgg

SEQ ID NO: 5364 - DNA, 23 bp, Homo sapiens
gaatgtcgccctccgttgaatgg

SEQ ID NO: 5365 - DNA, 23 bp, Homo sapiens
gacaagaggaattatggagtagg

SEQ ID NO: 5366 - DNA, 23 bp, Homo sapiens
gacaagaggaattatggggtagg

SEQ ID NO: 5367 - DNA, 23 bp, Homo sapiens
gacaagaggaattatggggtggg

SEQ ID NO: 5368 - DNA, 23 bp, Homo sapiens
gacacagaactacaagcgccagg

SEQ ID NO: 5369 - DNA, 23 bp, Homo sapiens
gacacagaagtacaagcgccagg

SEQ ID NO: 5370 - DNA, 23 bp, Homo sapiens
gacacagatctgcaaggccaagg

SEQ ID NO: 5371 - DNA, 23 bp, Homo sapiens
gacaccgccatgtcccggcccgg

SEQ ID NO: 5372 - DNA, 23 bp, Homo sapiens
gacaccgccgtgtcccggcccgg

SEQ ID NO: 5373 - DNA, 23 bp, Homo sapiens
gacacctggggtagggaaggggg

SEQ ID NO: 5374 - DNA, 23 bp, Homo sapiens
gacacctggggtggggaaggcgg

SEQ ID NO: 5375 - DNA, 23 bp, Homo sapiens
gacacctggggtggggaaggggg

SEQ ID NO: 5376 - DNA, 23 bp, Homo sapiens
gacaggaggaattagggggtggg

SEQ ID NO: 5377 - DNA, 23 bp, Homo sapiens
gacaggaggaattatggggtggg

SEQ ID NO: 5378 - DNA, 23 bp, Homo sapiens
gacagggcacatttctagctggg

SEQ ID NO: 5379 - DNA, 23 bp, Homo sapiens
gaccaacccgggggaatttttgg

SEQ ID NO: 5380 - DNA, 23 bp, Homo sapiens
gaccaacccggggggatttttgg

SEQ ID NO: 5381 - DNA, 23 bp, Homo sapiens
gaccaacctggggggatttttgg

SEQ ID NO: 5382 - DNA, 23 bp, Homo sapiens
gaccaccaagcacaagtgggagg

SEQ ID NO: 5383 - DNA, 23 bp, Homo sapiens
gaccagcatctcggcgtctgagg

SEQ ID NO: 5384 - DNA, 23 bp, Homo sapiens
gaccagcatcttggcgtctgagg

SEQ ID NO: 5385 - DNA, 23 bp, Homo sapiens
gaccagggcgggtgagtgcgggg

SEQ ID NO: 5386 - DNA, 23 bp, Homo sapiens
gacccacccgaccctcctcccgg

SEQ ID NO: 5387 - DNA, 23 bp, Homo sapiens
gacccacccggggggatttttgg

SEQ ID NO: 5388 - DNA, 23 bp, Homo sapiens
gacccaggacaccgagcttgtgg

SEQ ID NO: 5389 - DNA, 23 bp, Homo sapiens
gacccaggacacggagctcgtgg

SEQ ID NO: 5390 - DNA, 23 bp, Homo sapiens
gacccaggacacggagcttgtgg

SEQ ID NO: 5391 - DNA, 23 bp, Homo sapiens
gacccagttctcactcccattgg

SEQ ID NO: 5392 - DNA, 23 bp, Homo sapiens
gaccccgagacccttgacccggg

SEQ ID NO: 5393 - DNA, 23 bp, Homo sapiens
gaccccgagacccttgccccggg

SEQ ID NO: 5394 - DNA, 23 bp, Homo sapiens
gaccccgaggatggccgtcatgg

SEQ ID NO: 5395 - DNA, 23 bp, Homo sapiens
gaccccgcactcaccagcccagg

SEQ ID NO: 5396 - DNA, 23 bp, Homo sapiens
gaccccgcactcacccgcccagg

SEQ ID NO: 5397 - DNA, 23 bp, Homo sapiens
gaccccgcactcacccgccctgg

SEQ ID NO: 5398 - DNA, 23 bp, Homo sapiens
gaccccgcactcaccggcccagg

SEQ ID NO: 5399 - DNA, 23 bp, Homo sapiens
gaccccgcactcacctgcccagg

SEQ ID NO: 5400 - DNA, 23 bp, Homo sapiens
gacccctcatcccccacggacgg

SEQ ID NO: 5401 - DNA, 23 bp, Homo sapiens
gacccctcatcccctacggacgg

SEQ ID NO: 5402 - DNA, 23 bp, Homo sapiens
gacccctgatcactatcctaggg

SEQ ID NO: 5403 - DNA, 23 bp, Homo sapiens
gacccctgatcagtattccaggg

SEQ ID NO: 5404 - DNA, 23 bp, Homo sapiens
gacccctgatcagtattctaggg

SEQ ID NO: 5405 - DNA, 23 bp, Homo sapiens
gacccgcatctcggcctctgggg

SEQ ID NO: 5406 - DNA, 23 bp, Homo sapiens
gacccgcatctcggcgtctgagg

SEQ ID NO: 5407 - DNA, 23 bp, Homo sapiens
gacccgcatctcggcgtctgggg

SEQ ID NO: 5408 - DNA, 23 bp, Homo sapiens
gacccgcatctcggtgtctgagg

SEQ ID NO: 5409 - DNA, 23 bp, Homo sapiens
gacccgccagaccctcctcccgg

SEQ ID NO: 5410 - DNA, 23 bp, Homo sapiens
gacccgcccaaaccctcgaccgg

SEQ ID NO: 5411 - DNA, 23 bp, Homo sapiens
gacccgcccagaccctcgaccgg

SEQ ID NO: 5412 - DNA, 23 bp, Homo sapiens
gacccgcccgaccctcctccagg

SEQ ID NO: 5413 - DNA, 23 bp, Homo sapiens
gacccgcccgaccctcctcccgg

SEQ ID NO: 5414 - DNA, 23 bp, Homo sapiens
gaccctacataggttggcagagg

SEQ ID NO: 5415 - DNA, 23 bp, Homo sapiens
gaccctacataggttgggagagg

SEQ ID NO: 5416 - DNA, 23 bp, Homo sapiens
gaccctacgtaggttgggagagg

SEQ ID NO: 5417 - DNA, 23 bp, Homo sapiens
gaccctgagagccacgcctgggg

SEQ ID NO: 5418 - DNA, 23 bp, Homo sapiens
gaccctgagagccccgcccgggg

SEQ ID NO: 5419 - DNA, 23 bp, Homo sapiens
gaccctgctaaaggtcagagagg

SEQ ID NO: 5420 - DNA, 23 bp, Homo sapiens
gaccgaccctcctcccggcgcgg

SEQ ID NO: 5421 - DNA, 23 bp, Homo sapiens
gaccgcctcccacttgcgcttgg

SEQ ID NO: 5422 - DNA, 23 bp, Homo sapiens
gaccgggctgaccacgggggcgg

SEQ ID NO: 5423 - DNA, 23 bp, Homo sapiens
gaccgggctgaccgcggggtcgg

SEQ ID NO: 5424 - DNA, 23 bp, Homo sapiens
gacctctcatcccccacggacgg

SEQ ID NO: 5425 - DNA, 23 bp, Homo sapiens
gacctgaccgaccctcctcccgg

SEQ ID NO: 5426 - DNA, 23 bp, Homo sapiens
gacctgcccgaccctcctcccgg

SEQ ID NO: 5427 - DNA, 23 bp, Homo sapiens
gacctgcccgaccctcgtcccgg

SEQ ID NO: 5428 - DNA, 23 bp, Homo sapiens
gacctggaccggtgagtgcgggg

SEQ ID NO: 5429 - DNA, 23 bp, Homo sapiens
gacctggcagcgggatggcgagg

SEQ ID NO: 5430 - DNA, 23 bp, Homo sapiens
gacctggcagcgggatggggagg

SEQ ID NO: 5431 - DNA, 23 bp, Homo sapiens
gacctggcagtgggatggggagg

SEQ ID NO: 5432 - DNA, 23 bp, Homo sapiens
gacctgggcaggtgagtgcgggg

SEQ ID NO: 5433 - DNA, 23 bp, Homo sapiens
gacctgggccggtgagtgcgggg

SEQ ID NO: 5434 - DNA, 23 bp, Homo sapiens
gacctgggcctgtgagtgcgagg

SEQ ID NO: 5435 - DNA, 23 bp, Homo sapiens
gacctgggcctgtgagtgcgggg

SEQ ID NO: 5436 - DNA, 23 bp, Homo sapiens
gacctgggcgggtgagtgcgggg

SEQ ID NO: 5437 - DNA, 23 bp, Homo sapiens
gacctgggctggtgagtgcgggg

SEQ ID NO: 5438 - DNA, 23 bp, Homo sapiens
gacgatgtacggctgcgacgtgg

SEQ ID NO: 5439 - DNA, 23 bp, Homo sapiens
gacgatgtatggctgcgacctgg

SEQ ID NO: 5440 - DNA, 23 bp, Homo sapiens
gacgatgtatggctgcgacgtgg

SEQ ID NO: 5441 - DNA, 23 bp, Homo sapiens
gacgccgaggatggccgtcatgg

SEQ ID NO: 5442 - DNA, 23 bp, Homo sapiens
gacggccatcctcggcgtctggg

SEQ ID NO: 5443 - DNA, 23 bp, Homo sapiens
gacggccatcctcggggtctggg

SEQ ID NO: 5444 - DNA, 23 bp, Homo sapiens
gacgggctgaccacgggggcggg

SEQ ID NO: 5445 - DNA, 23 bp, Homo sapiens
gacggggctctcagggtctcagg

SEQ ID NO: 5446 - DNA, 23 bp, Homo sapiens
gacggggctgaccacgggggcgg

SEQ ID NO: 5447 - DNA, 23 bp, Homo sapiens
gacggggctgaccgcggggccgg

SEQ ID NO: 5448 - DNA, 23 bp, Homo sapiens
gacggggctgaccgcgggggcgg

SEQ ID NO: 5449 - DNA, 23 bp, Homo sapiens
gacggtgagtgaccccggcccgg

SEQ ID NO: 5450 - DNA, 23 bp, Homo sapiens
gacggtgctgaccgcggggccgg

SEQ ID NO: 5451 - DNA, 23 bp, Homo sapiens
gacggtgtgagaacctggcccgg

SEQ ID NO: 5452 - DNA, 23 bp, Homo sapiens
gacgtctctgaggaaatggaggg

SEQ ID NO: 5453 - DNA, 23 bp, Homo sapiens
gacgtctctgaggaaatgtaggg

SEQ ID NO: 5454 - DNA, 23 bp, Homo sapiens
gacgtgggacaggaggaattagg

SEQ ID NO: 5455 - DNA, 23 bp, Homo sapiens
gactcacgaatgctggaatcagg

SEQ ID NO: 5456 - DNA, 23 bp, Homo sapiens
gactcatgaatgctgaaatcagg

SEQ ID NO: 5457 - DNA, 23 bp, Homo sapiens
gactcatgaatgctggaatcagg

SEQ ID NO: 5458 - DNA, 23 bp, Homo sapiens
gactccccatcccccacggacgg

SEQ ID NO: 5459 - DNA, 23 bp, Homo sapiens
gactccccatcccccacgtacgg

SEQ ID NO: 5460 - DNA, 23 bp, Homo sapiens
gactccgagacccttgtcccggg

SEQ ID NO: 5461 - DNA, 23 bp, Homo sapiens
gactctgagagccacgcctgggg

SEQ ID NO: 5462 - DNA, 23 bp, Homo sapiens
gactgggctgaccgcggggccgg

SEQ ID NO: 5463 - DNA, 23 bp, Homo sapiens
gactgggctgaccgcgggggcgg

SEQ ID NO: 5464 - DNA, 23 bp, Homo sapiens
gactgggctgaccgcggggtcgg

SEQ ID NO: 5465 - DNA, 23 bp, Homo sapiens
gactgggctgaccgtggggtcgg

SEQ ID NO: 5466 - DNA, 23 bp, Homo sapiens
gacttgtgactgctgggatcagg

SEQ ID NO: 5467 - DNA, 23 bp, Homo sapiens
gacttgtgactgctggtatcagg

SEQ ID NO: 5468 - DNA, 23 bp, Homo sapiens
gagaaaagaaactgcggagttgg

SEQ ID NO: 5469 - DNA, 23 bp, Homo sapiens
gagaacaaggcctgagagaaagg

SEQ ID NO: 5470 - DNA, 23 bp, Homo sapiens
gagaaccccgcccgggacctggg

SEQ ID NO: 5471 - DNA, 23 bp, Homo sapiens
gagaacctgcggaacctgcgcgg

SEQ ID NO: 5472 - DNA, 23 bp, Homo sapiens
gagaacctggggaccctgcgcgg

SEQ ID NO: 5473 - DNA, 23 bp, Homo sapiens
gagaacggacaggacacctgggg

SEQ ID NO: 5474 - DNA, 23 bp, Homo sapiens
gagaagccaatcagcgtcgccgg

SEQ ID NO: 5475 - DNA, 23 bp, Homo sapiens
gagaagccaatcagtgtcgccgg

SEQ ID NO: 5476 - DNA, 23 bp, Homo sapiens
gagaagggaacagcgacttctgg

SEQ ID NO: 5477 - DNA, 23 bp, Homo sapiens
gagaatggacaggacacctgggg

SEQ ID NO: 5478 - DNA, 23 bp, Homo sapiens
gagaatggacgggacacctgggg

SEQ ID NO: 5479 - DNA, 23 bp, Homo sapiens
gagaatgggcaggacacctgggg

SEQ ID NO: 5480 - DNA, 23 bp, Homo sapiens
gagacagaaccttccagaagtgg

SEQ ID NO: 5481 - DNA, 23 bp, Homo sapiens
gagaccaggccagcaggagatgg

SEQ ID NO: 5482 - DNA, 23 bp, Homo sapiens
gagaccaggcctgcaggggatgg

SEQ ID NO: 5483 - DNA, 23 bp, Homo sapiens
gagacccagagagccccgcccgg

SEQ ID NO: 5484 - DNA, 23 bp, Homo sapiens
gagaccctgagaaccccgcccgg

SEQ ID NO: 5485 - DNA, 23 bp, Homo sapiens
gagaccctgagagccacgcctgg

SEQ ID NO: 5486 - DNA, 23 bp, Homo sapiens
gagaccctgagagccccgcccgg

SEQ ID NO: 5487 - DNA, 23 bp, Homo sapiens
gagaccctgagagccccgtccgg

SEQ ID NO: 5488 - DNA, 23 bp, Homo sapiens
gagacctggaccggtgagtgcgg

SEQ ID NO: 5489 - DNA, 23 bp, Homo sapiens
gagacctgggccggtgagtgcgg

SEQ ID NO: 5490 - DNA, 23 bp, Homo sapiens
gagacctgggcctgtgagtgcgg

SEQ ID NO: 5491 - DNA, 23 bp, Homo sapiens
gagacctgggctggtgagtgcgg

SEQ ID NO: 5492 - DNA, 23 bp, Homo sapiens
gagactctgagagccacgcctgg

SEQ ID NO: 5493 - DNA, 23 bp, Homo sapiens
gagagacacatcagagccctggg

SEQ ID NO: 5494 - DNA, 23 bp, Homo sapiens
gagagacatatcagagccctggg

SEQ ID NO: 5495 - DNA, 23 bp, Homo sapiens
gagagactcatcagagccctggg

SEQ ID NO: 5496 - DNA, 23 bp, Homo sapiens
gagagaggggaccgcaggcgggg

SEQ ID NO: 5497 - DNA, 23 bp, Homo sapiens
gagagccacgcctggggccctgg

SEQ ID NO: 5498 - DNA, 23 bp, Homo sapiens
gagagccccgcccgggacctggg

SEQ ID NO: 5499 - DNA, 23 bp, Homo sapiens
gagagccccgcccggggcctggg

SEQ ID NO: 5500 - DNA, 23 bp, Homo sapiens
gagagccccgtccgggacatggg

SEQ ID NO: 5501 - DNA, 23 bp, Homo sapiens
gagagccccgtccgggacctggg

SEQ ID NO: 5502 - DNA, 23 bp, Homo sapiens
gagagcctgcggaacctgcgcgg

SEQ ID NO: 5503 - DNA, 23 bp, Homo sapiens
gagagcctggggacgaggagtgg

SEQ ID NO: 5504 - DNA, 23 bp, Homo sapiens
gagaggagccgcgggcgccgtgg

SEQ ID NO: 5505 - DNA, 23 bp, Homo sapiens
gagagggagaaaagaaactgcgg

SEQ ID NO: 5506 - DNA, 23 bp, Homo sapiens
gagataccagaaaggagccaggg

SEQ ID NO: 5507 - DNA, 23 bp, Homo sapiens
gagataccagaaaggagtcaggg

SEQ ID NO: 5508 - DNA, 23 bp, Homo sapiens
gagatagaaccttccagaagtgg

SEQ ID NO: 5509 - DNA, 23 bp, Homo sapiens
gagatccaccccgaagccgcggg

SEQ ID NO: 5510 - DNA, 23 bp, Homo sapiens
gagatccgcccccgaggccgcgg

SEQ ID NO: 5511 - DNA, 23 bp, Homo sapiens
gagatccgccccgaagccgcggg

SEQ ID NO: 5512 - DNA, 23 bp, Homo sapiens
gagatggaaccttccagaagtgg

SEQ ID NO: 5513 - DNA, 23 bp, Homo sapiens
gagattctggggagctgaagtgg

SEQ ID NO: 5514 - DNA, 23 bp, Homo sapiens
gagattcttggggtctagagtgg

SEQ ID NO: 5515 - DNA, 23 bp, Homo sapiens
gagatttcttgtctcactgaggg

SEQ ID NO: 5516 - DNA, 23 bp, Homo sapiens
gagcaaggggaccgcaggcgggg

SEQ ID NO: 5517 - DNA, 23 bp, Homo sapiens
gagcagcaggaggacggttcggg

SEQ ID NO: 5518 - DNA, 23 bp, Homo sapiens
gagcagcaggaggagggctcggg

SEQ ID NO: 5519 - DNA, 23 bp, Homo sapiens
gagcagcaggaggagggcttggg

SEQ ID NO: 5520 - DNA, 23 bp, Homo sapiens
gagcagcaggaggagggttcggg

SEQ ID NO: 5521 - DNA, 23 bp, Homo sapiens
gagcagcaggatgagggttcggg

SEQ ID NO: 5522 - DNA, 23 bp, Homo sapiens
gagcatgtacggctgcgacgtgg

SEQ ID NO: 5523 - DNA, 23 bp, Homo sapiens
gagccagaagatggagccgcggg

SEQ ID NO: 5524 - DNA, 23 bp, Homo sapiens
gagccagaggatggagccgcggg

SEQ ID NO: 5525 - DNA, 23 bp, Homo sapiens
gagccccacttcatcgcagtggg

SEQ ID NO: 5526 - DNA, 23 bp, Homo sapiens
gagccccaggcgcgtttacccgg

SEQ ID NO: 5527 - DNA, 23 bp, Homo sapiens
gagccccagtcacctttacccgg

SEQ ID NO: 5528 - DNA, 23 bp, Homo sapiens
gagccccagtcgcctttacccgg

SEQ ID NO: 5529 - DNA, 23 bp, Homo sapiens
gagccccgcttcatcaccgtggg

SEQ ID NO: 5530 - DNA, 23 bp, Homo sapiens
gagccccgcttcatcgcagtggg

SEQ ID NO: 5531 - DNA, 23 bp, Homo sapiens
gagccccgcttcatcgccgtggg

SEQ ID NO: 5532 - DNA, 23 bp, Homo sapiens
gagccccgcttcatctcagtggg

SEQ ID NO: 5533 - DNA, 23 bp, Homo sapiens
gagccccgcttcattgcagtggg

SEQ ID NO: 5534 - DNA, 23 bp, Homo sapiens
gagcccctcaccctgagatgggg

SEQ ID NO: 5535 - DNA, 23 bp, Homo sapiens
gagcccctcaccctgagctgggg

SEQ ID NO: 5536 - DNA, 23 bp, Homo sapiens
gagccctagtcgcctttacccgg

SEQ ID NO: 5537 - DNA, 23 bp, Homo sapiens
gagccggaggatggagccgcggg

SEQ ID NO: 5538 - DNA, 23 bp, Homo sapiens
gagccgtgggtggagcaggaggg

SEQ ID NO: 5539 - DNA, 23 bp, Homo sapiens
gagcctctctgacctttagcagg

SEQ ID NO: 5540 - DNA, 23 bp, Homo sapiens
gagccttccccatctcctatagg

SEQ ID NO: 5541 - DNA, 23 bp, Homo sapiens
gagccttgtctgcattggggagg

SEQ ID NO: 5542 - DNA, 23 bp, Homo sapiens
gagcgaggggaccgcaggcgggg

SEQ ID NO: 5543 - DNA, 23 bp, Homo sapiens
gagctaccagaaaggagccaggg

SEQ ID NO: 5544 - DNA, 23 bp, Homo sapiens
gagctgaagtggtcgggggtggg

SEQ ID NO: 5545 - DNA, 23 bp, Homo sapiens
gagctgaagtggtctggggtggg

SEQ ID NO: 5546 - DNA, 23 bp, Homo sapiens
gagctgggtgatctgagccgcgg

SEQ ID NO: 5547 - DNA, 23 bp, Homo sapiens
gagctgtggtcgctgctgtgagg

SEQ ID NO: 5548 - DNA, 23 bp, Homo sapiens
gaggaaaagtcacgggcccaagg

SEQ ID NO: 5549 - DNA, 23 bp, Homo sapiens
gaggaaaagtcacggtcccaagg

SEQ ID NO: 5550 - DNA, 23 bp, Homo sapiens
gaggaaaatgggatcagcactgg

SEQ ID NO: 5551 - DNA, 23 bp, Homo sapiens
gaggaaaatgggatcagcgctgg

SEQ ID NO: 5552 - DNA, 23 bp, Homo sapiens
gaggaaagtcacggttcccaagg

SEQ ID NO: 5553 - DNA, 23 bp, Homo sapiens
gaggacagacctcaggagggcgg

SEQ ID NO: 5554 - DNA, 23 bp, Homo sapiens
gaggagactctgagtccgggtgg

SEQ ID NO: 5555 - DNA, 23 bp, Homo sapiens
gaggagattctgagtccgggtgg

SEQ ID NO: 5556 - DNA, 23 bp, Homo sapiens
gaggagattttgagtccgggtgg

SEQ ID NO: 5557 - DNA, 23 bp, Homo sapiens
gaggagccgcgccgggaggaggg

SEQ ID NO: 5558 - DNA, 23 bp, Homo sapiens
gaggaggaagagctcaggtgggg

SEQ ID NO: 5559 - DNA, 23 bp, Homo sapiens
gaggagggaacagcgacttctgg

SEQ ID NO: 5560 - DNA, 23 bp, Homo sapiens
gaggatgtacggctgcgacctgg

SEQ ID NO: 5561 - DNA, 23 bp, Homo sapiens
gaggatgtacggctgcgacgtgg

SEQ ID NO: 5562 - DNA, 23 bp, Homo sapiens
gaggatgtatggctgcgacctgg

SEQ ID NO: 5563 - DNA, 23 bp, Homo sapiens
gaggatgtatggctgcgacgtgg

SEQ ID NO: 5564 - DNA, 23 bp, Homo sapiens
gaggatgtctggctgcgacctgg

SEQ ID NO: 5565 - DNA, 23 bp, Homo sapiens
gaggatgtctggctgcgacgtgg

SEQ ID NO: 5566 - DNA, 23 bp, Homo sapiens
gaggatgtgtggctgcgacgtgg

SEQ ID NO: 5567 - DNA, 23 bp, Homo sapiens
gaggatgtttggctgcgacctgg

SEQ ID NO: 5568 - DNA, 23 bp, Homo sapiens
gaggatgtttggctgcgacgtgg

SEQ ID NO: 5569 - DNA, 23 bp, Homo sapiens
gaggcccaggcgccttaacccgg

SEQ ID NO: 5570 - DNA, 23 bp, Homo sapiens
gaggcccaggcgcctttacccgg

SEQ ID NO: 5571 - DNA, 23 bp, Homo sapiens
gaggcccaggcgcctttagccgg

SEQ ID NO: 5572 - DNA, 23 bp, Homo sapiens
gaggcctgagtattgggaccagg

SEQ ID NO: 5573 - DNA, 23 bp, Homo sapiens
gaggctcttgaagtcacaaaggg

SEQ ID NO: 5574 - DNA, 23 bp, Homo sapiens
gagggaaaaggcctaggtaatgg

SEQ ID NO: 5575 - DNA, 23 bp, Homo sapiens
gagggaaaaggcctgggtaatgg

SEQ ID NO: 5576 - DNA, 23 bp, Homo sapiens
gagggacacatcagagccctggg

SEQ ID NO: 5577 - DNA, 23 bp, Homo sapiens
gagggagcacaggtcagcgtggg

SEQ ID NO: 5578 - DNA, 23 bp, Homo sapiens
gagggaggaacagcgacttctgg

SEQ ID NO: 5579 - DNA, 23 bp, Homo sapiens
gagggcactgggaggaagcaggg

SEQ ID NO: 5580 - DNA, 23 bp, Homo sapiens
gagggccccctctgctctctagg

SEQ ID NO: 5581 - DNA, 23 bp, Homo sapiens
gagggccccctcttctctctagg

SEQ ID NO: 5582 - DNA, 23 bp, Homo sapiens
gagggccccgtctgctctctagg

SEQ ID NO: 5583 - DNA, 23 bp, Homo sapiens
gaggggaaaggcctgggtaatgg

SEQ ID NO: 5584 - DNA, 23 bp, Homo sapiens
gaggggacagggaggaggcaggg

SEQ ID NO: 5585 - DNA, 23 bp, Homo sapiens
gaggggacagggaggagtcaggg

SEQ ID NO: 5586 - DNA, 23 bp, Homo sapiens
gaggggactgggaggaagcaggg

SEQ ID NO: 5587 - DNA, 23 bp, Homo sapiens
gaggggactgggaggaggcaggg

SEQ ID NO: 5588 - DNA, 23 bp, Homo sapiens
gaggggagccccgggcgccgtgg

SEQ ID NO: 5589 - DNA, 23 bp, Homo sapiens
gaggggagccgcgggagccgtgg

SEQ ID NO: 5590 - DNA, 23 bp, Homo sapiens
gaggggagccgcgggcgccgtgg

SEQ ID NO: 5591 - DNA, 23 bp, Homo sapiens
gaggggccggagtattgggacgg

SEQ ID NO: 5592 - DNA, 23 bp, Homo sapiens
gaggggtcatatctcttctcagg

SEQ ID NO: 5593 - DNA, 23 bp, Homo sapiens
gaggggtcatatctgttctcagg

SEQ ID NO: 5594 - DNA, 23 bp, Homo sapiens
gaggggtcatgtgtcttctcagg

SEQ ID NO: 5595 - DNA, 23 bp, Homo sapiens
gaggggtgatgtgtcttctcagg

SEQ ID NO: 5596 - DNA, 23 bp, Homo sapiens
gagggtcatggtggacatcgggg

SEQ ID NO: 5597 - DNA, 23 bp, Homo sapiens
gagggtcatggtggacatggggg

SEQ ID NO: 5598 - DNA, 23 bp, Homo sapiens
gagggtccggagtattgggacgg

SEQ ID NO: 5599 - DNA, 23 bp, Homo sapiens
gagggtctgggcgggtcccgcgg

SEQ ID NO: 5600 - DNA, 23 bp, Homo sapiens
gagggtgtgagaacctggcccgg

SEQ ID NO: 5601 - DNA, 23 bp, Homo sapiens
gagggttcggggcgccatgacgg

SEQ ID NO: 5602 - DNA, 23 bp, Homo sapiens
gagggttcggggcgccatgatgg

SEQ ID NO: 5603 - DNA, 23 bp, Homo sapiens
gagggttcggggcggcatgacgg

SEQ ID NO: 5604 - DNA, 23 bp, Homo sapiens
gagggtttgggcgggtcccgcgg

SEQ ID NO: 5605 - DNA, 23 bp, Homo sapiens
gaggtcgtgacctgcgccccggg

SEQ ID NO: 5606 - DNA, 23 bp, Homo sapiens
gaggtgggtgggctcccccatgg

SEQ ID NO: 5607 - DNA, 23 bp, Homo sapiens
gaggttcccctaagatcacatgg

SEQ ID NO: 5608 - DNA, 23 bp, Homo sapiens
gaggttcccctaagatcgcatgg

SEQ ID NO: 5609 - DNA, 23 bp, Homo sapiens
gaggttcccctaagattgcatgg

SEQ ID NO: 5610 - DNA, 23 bp, Homo sapiens
gaggttcctctaagatctcatgg

SEQ ID NO: 5611 - DNA, 23 bp, Homo sapiens
gaggttcctctaggaccttaagg

SEQ ID NO: 5612 - DNA, 23 bp, Homo sapiens
gagtagcaggacgagggttcggg

SEQ ID NO: 5613 - DNA, 23 bp, Homo sapiens
gagtagcaggaggagggttcggg

SEQ ID NO: 5614 - DNA, 23 bp, Homo sapiens
gagtattgggacgaggagacagg

SEQ ID NO: 5615 - DNA, 23 bp, Homo sapiens
gagtcatatgcgtcctggggggg

SEQ ID NO: 5616 - DNA, 23 bp, Homo sapiens
gagtcatatgcgtcttggggggg

SEQ ID NO: 5617 - DNA, 23 bp, Homo sapiens
gagtccaagaggggagccgcggg

SEQ ID NO: 5618 - DNA, 23 bp, Homo sapiens
gagtcccggtgggtgcgtgcggg

SEQ ID NO: 5619 - DNA, 23 bp, Homo sapiens
gagtccctcagcctccactcagg

SEQ ID NO: 5620 - DNA, 23 bp, Homo sapiens
gagtccgagagaggagccgcggg

SEQ ID NO: 5621 - DNA, 23 bp, Homo sapiens
gagtccgagaggggagccccggg

SEQ ID NO: 5622 - DNA, 23 bp, Homo sapiens
gagtccgagaggggagccgcggg

SEQ ID NO: 5623 - DNA, 23 bp, Homo sapiens
gagtccgaggaaggagccgcggg

SEQ ID NO: 5624 - DNA, 23 bp, Homo sapiens
gagtccgaggacggagccccggg

SEQ ID NO: 5625 - DNA, 23 bp, Homo sapiens
gagtccgaggatggcgccccggg

SEQ ID NO: 5626 - DNA, 23 bp, Homo sapiens
gagtcctgcagcctccactcagg

SEQ ID NO: 5627 - DNA, 23 bp, Homo sapiens
gagtccttcagcctccactcagg

SEQ ID NO: 5628 - DNA, 23 bp, Homo sapiens
gagtccttcggcctccactcagg

SEQ ID NO: 5629 - DNA, 23 bp, Homo sapiens
gagtctctcagcctccactcagg

SEQ ID NO: 5630 - DNA, 23 bp, Homo sapiens
gagtctctcatcacttgtaaagg

SEQ ID NO: 5631 - DNA, 23 bp, Homo sapiens
gagtctctcatcgcttgtaaagg

SEQ ID NO: 5632 - DNA, 23 bp, Homo sapiens
gagtctctgagcggggaacaggg

SEQ ID NO: 5633 - DNA, 23 bp, Homo sapiens
gagtctctgagtggggaacaggg

SEQ ID NO: 5634 - DNA, 23 bp, Homo sapiens
gagtgcgtggagtggctccgcgg

SEQ ID NO: 5635 - DNA, 23 bp, Homo sapiens
gagtgggcgggggggcggggagg

SEQ ID NO: 5636 - DNA, 23 bp, Homo sapiens
gagtgggcggggggggtggtggg

SEQ ID NO: 5637 - DNA, 23 bp, Homo sapiens
gagttcttcagcctccactcagg

SEQ ID NO: 5638 - DNA, 23 bp, Homo sapiens
gagttttcttgtcccactggggg

SEQ ID NO: 5639 - DNA, 23 bp, Homo sapiens
gataatgtatggctgcgacgtgg

SEQ ID NO: 5640 - DNA, 23 bp, Homo sapiens
gatagccacatgtgtgctggagg

SEQ ID NO: 5641 - DNA, 23 bp, Homo sapiens
gatagtcacatgggcgctgttgg

SEQ ID NO: 5642 - DNA, 23 bp, Homo sapiens
gatcacactgacctggcagcggg

SEQ ID NO: 5643 - DNA, 23 bp, Homo sapiens
gatcacactgacctggcagtggg

SEQ ID NO: 5644 - DNA, 23 bp, Homo sapiens
gatcaccaagcgcaagtgggagg

SEQ ID NO: 5645 - DNA, 23 bp, Homo sapiens
gatcacccagcgcaagtgggagg

SEQ ID NO: 5646 - DNA, 23 bp, Homo sapiens
gatcacccagcgcaagttggagg

SEQ ID NO: 5647 - DNA, 23 bp, Homo sapiens
gatcacccagctcaagtgggagg

SEQ ID NO: 5648 - DNA, 23 bp, Homo sapiens
gatccacccccctgaggccgcgg

SEQ ID NO: 5649 - DNA, 23 bp, Homo sapiens
gatcccgcactcaccggcccagg

SEQ ID NO: 5650 - DNA, 23 bp, Homo sapiens
gatccgaccccctgaggccgcgg

SEQ ID NO: 5651 - DNA, 23 bp, Homo sapiens
gatccgcccccctgaggccgcgg

SEQ ID NO: 5652 - DNA, 23 bp, Homo sapiens
gatccgcccgaccctcctcccgg

SEQ ID NO: 5653 - DNA, 23 bp, Homo sapiens
gatccgcctccctgaggccgcgg

SEQ ID NO: 5654 - DNA, 23 bp, Homo sapiens
gatctcagacccggagactcggg

SEQ ID NO: 5655 - DNA, 23 bp, Homo sapiens
gatctcagaccgggagactcggg

SEQ ID NO: 5656 - DNA, 23 bp, Homo sapiens
gatctcagaccgggagacttggg

SEQ ID NO: 5657 - DNA, 23 bp, Homo sapiens
gatctcagacggggagactcggg

SEQ ID NO: 5658 - DNA, 23 bp, Homo sapiens
gatctcagacggggagactctgg

SEQ ID NO: 5659 - DNA, 23 bp, Homo sapiens
gatctcccagcgcaagtgggagg

SEQ ID NO: 5660 - DNA, 23 bp, Homo sapiens
gatctcccagcgcaagttggagg

SEQ ID NO: 5661 - DNA, 23 bp, Homo sapiens
gatctcggacccggagactcggg

SEQ ID NO: 5662 - DNA, 23 bp, Homo sapiens
gatctcggacccggagactgtgg

SEQ ID NO: 5663 - DNA, 23 bp, Homo sapiens
gatctgagccgccgtgtccgcgg

SEQ ID NO: 5664 - DNA, 23 bp, Homo sapiens
gatctgagccgccttgtccgcgg

SEQ ID NO: 5665 - DNA, 23 bp, Homo sapiens
gatctgagccgctgtgtccgcgg

SEQ ID NO: 5666 - DNA, 23 bp, Homo sapiens
gatgatgtatggctgccacgtgg

SEQ ID NO: 5667 - DNA, 23 bp, Homo sapiens
gatgatgtatggctgcgacgtgg

SEQ ID NO: 5668 - DNA, 23 bp, Homo sapiens
gatgatgtttggctgcgacgtgg

SEQ ID NO: 5669 - DNA, 23 bp, Homo sapiens
gatgattggagagggagcacagg

SEQ ID NO: 5670 - DNA, 23 bp, Homo sapiens
gatgattggggagggagcacagg

SEQ ID NO: 5671 - DNA, 23 bp, Homo sapiens
gatgcccaagttggggatggtgg

SEQ ID NO: 5672 - DNA, 23 bp, Homo sapiens
gatgcccacaatggggatggtgg

SEQ ID NO: 5673 - DNA, 23 bp, Homo sapiens
gatgcccacgatggggacggtgg

SEQ ID NO: 5674 - DNA, 23 bp, Homo sapiens
gatgcccacgatggggatggtgg

SEQ ID NO: 5675 - DNA, 23 bp, Homo sapiens
gatgcccacgatgtggacggtgg

SEQ ID NO: 5676 - DNA, 23 bp, Homo sapiens
gatgcccatgatggggatggtgg

SEQ ID NO: 5677 - DNA, 23 bp, Homo sapiens
gatgctgcatcccagtaatgagg

SEQ ID NO: 5678 - DNA, 23 bp, Homo sapiens
gatgctgcttcccagtaatgagg

SEQ ID NO: 5679 - DNA, 23 bp, Homo sapiens
gatggacaggacacctgggatgg

SEQ ID NO: 5680 - DNA, 23 bp, Homo sapiens
gatggccacatgcatgctggtgg

SEQ ID NO: 5681 - DNA, 23 bp, Homo sapiens
gatggccacatgcgtgctggtgg

SEQ ID NO: 5682 - DNA, 23 bp, Homo sapiens
gatggggtaaggagggagacggg

SEQ ID NO: 5683 - DNA, 23 bp, Homo sapiens
gatggggtaaggagggagatggg

SEQ ID NO: 5684 - DNA, 23 bp, Homo sapiens
gatggtcacatgggcactgttgg

SEQ ID NO: 5685 - DNA, 23 bp, Homo sapiens
gatggtcacatgggcgctgctgg

SEQ ID NO: 5686 - DNA, 23 bp, Homo sapiens
gatggtcacatgggcgctgttgg

SEQ ID NO: 5687 - DNA, 23 bp, Homo sapiens
gatggtcacatgggtgctgttgg

SEQ ID NO: 5688 - DNA, 23 bp, Homo sapiens
gatggtgcttcccagtaacgagg

SEQ ID NO: 5689 - DNA, 23 bp, Homo sapiens
gatggtgtgagaacctggcccgg

SEQ ID NO: 5690 - DNA, 23 bp, Homo sapiens
gatgtaatccttgccgtcgtagg

SEQ ID NO: 5691 - DNA, 23 bp, Homo sapiens
gatgtaatccttgccgtcttagg

SEQ ID NO: 5692 - DNA, 23 bp, Homo sapiens
gatgtaatctttgccgtcgtagg

SEQ ID NO: 5693 - DNA, 23 bp, Homo sapiens
gatgtgtgttgggtgttgggcgg

SEQ ID NO: 5694 - DNA, 23 bp, Homo sapiens
gatgtgtgttgggtgttgggggg

SEQ ID NO: 5695 - DNA, 23 bp, Homo sapiens
gatgtgtgttgggtgttgggtgg

SEQ ID NO: 5696 - DNA, 23 bp, Homo sapiens
gattccagcattcatgagtcagg

SEQ ID NO: 5697 - DNA, 23 bp, Homo sapiens
gattccagcattcgtgagtcagg

SEQ ID NO: 5698 - DNA, 23 bp, Homo sapiens
gattggggagtcacagccttggg

SEQ ID NO: 5699 - DNA, 23 bp, Homo sapiens
gattggggagtcccagccttggg

SEQ ID NO: 5700 - DNA, 23 bp, Homo sapiens
gattgtgggtggtgcttcccagg

SEQ ID NO: 5701 - DNA, 23 bp, Homo sapiens
gatttcagcattcatgagtcagg

SEQ ID NO: 5702 - DNA, 23 bp, Homo sapiens
gcaaaccctcatgctgcacatgg

SEQ ID NO: 5703 - DNA, 23 bp, Homo sapiens
gcaacgggcccgcctggcggggg

SEQ ID NO: 5704 - DNA, 23 bp, Homo sapiens
gcaagaggggccggagtattggg

SEQ ID NO: 5705 - DNA, 23 bp, Homo sapiens
gcaaggggcccgcccggcggggg

SEQ ID NO: 5706 - DNA, 23 bp, Homo sapiens
gcaaggggcccgcctggcggggg

SEQ ID NO: 5707 - DNA, 23 bp, Homo sapiens
gcaaggggccctcctggcggggg

SEQ ID NO: 5708 - DNA, 23 bp, Homo sapiens
gcaagggtctcggggtcccgcgg

SEQ ID NO: 5709 - DNA, 23 bp, Homo sapiens
gcaagtgggaggcggcccgtcgg

SEQ ID NO: 5710 - DNA, 23 bp, Homo sapiens
gcaagtgggaggcggcccgttgg

SEQ ID NO: 5711 - DNA, 23 bp, Homo sapiens
gcaatggggaggcgcagcgttgg

SEQ ID NO: 5712 - DNA, 23 bp, Homo sapiens
gcacacttctacctgggtcttgg

SEQ ID NO: 5713 - DNA, 23 bp, Homo sapiens
gcacagaacccagacaccagcgg

SEQ ID NO: 5714 - DNA, 23 bp, Homo sapiens
gcacagaacccagaccagcctgg

SEQ ID NO: 5715 - DNA, 23 bp, Homo sapiens
gcacaggtcagcgtgggaagagg

SEQ ID NO: 5716 - DNA, 23 bp, Homo sapiens
gcacatgtgacaatgaagcacgg

SEQ ID NO: 5717 - DNA, 23 bp, Homo sapiens
gcacatgtgacaatgaaggacgg

SEQ ID NO: 5718 - DNA, 23 bp, Homo sapiens
gcacatgtgacaatgaaggatgg

SEQ ID NO: 5719 - DNA, 23 bp, Homo sapiens
gcacatttctagctggggcttgg

SEQ ID NO: 5720 - DNA, 23 bp, Homo sapiens
gcaccgtggatagagcaggaggg

SEQ ID NO: 5721 - DNA, 23 bp, Homo sapiens
gcacgcatgtggccattttgagg

SEQ ID NO: 5722 - DNA, 23 bp, Homo sapiens
gcacggatgtatcaccttgatgg

SEQ ID NO: 5723 - DNA, 23 bp, Homo sapiens
gcacgggtaccaggggccacggg

SEQ ID NO: 5724 - DNA, 23 bp, Homo sapiens
gcacgggtaccgggggccacggg

SEQ ID NO: 5725 - DNA, 23 bp, Homo sapiens
gcactcacaggcccaggtctcgg

SEQ ID NO: 5726 - DNA, 23 bp, Homo sapiens
gcactcaccagcccaggtctcgg

SEQ ID NO: 5727 - DNA, 23 bp, Homo sapiens
gcactcacccgcccaggtctggg

SEQ ID NO: 5728 - DNA, 23 bp, Homo sapiens
gcactcacccgccctggtctggg

SEQ ID NO: 5729 - DNA, 23 bp, Homo sapiens
gcactcaccggcccaggtctcgg

SEQ ID NO: 5730 - DNA, 23 bp, Homo sapiens
gcactcacctgcccaggtctggg

SEQ ID NO: 5731 - DNA, 23 bp, Homo sapiens
gcactggggaggcgccgcgttgg

SEQ ID NO: 5732 - DNA, 23 bp, Homo sapiens
gcactgtcactgcctggggtagg

SEQ ID NO: 5733 - DNA, 23 bp, Homo sapiens
gcagaccctcatgctgcacatgg

SEQ ID NO: 5734 - DNA, 23 bp, Homo sapiens
gcagcagagagcctacctggagg

SEQ ID NO: 5735 - DNA, 23 bp, Homo sapiens
gcagccaaacatcatctggaggg

SEQ ID NO: 5736 - DNA, 23 bp, Homo sapiens
gcagccaaacatccactggaggg

SEQ ID NO: 5737 - DNA, 23 bp, Homo sapiens
gcagccaaacatcctctggaggg

SEQ ID NO: 5738 - DNA, 23 bp, Homo sapiens
gcagccacacatccactggaggg

SEQ ID NO: 5739 - DNA, 23 bp, Homo sapiens
gcagccacacatcctctggacgg

SEQ ID NO: 5740 - DNA, 23 bp, Homo sapiens
gcagccagacatcctctggaggg

SEQ ID NO: 5741 - DNA, 23 bp, Homo sapiens
gcagccagacatcctctggatgg

SEQ ID NO: 5742 - DNA, 23 bp, Homo sapiens
gcagccatacatattctggaggg

SEQ ID NO: 5743 - DNA, 23 bp, Homo sapiens
gcagccatacatcatctggatgg

SEQ ID NO: 5744 - DNA, 23 bp, Homo sapiens
gcagccatacatccactggaggg

SEQ ID NO: 5745 - DNA, 23 bp, Homo sapiens
gcagccatacatcctctggaagg

SEQ ID NO: 5746 - DNA, 23 bp, Homo sapiens
gcagccatacatcctctggacgg

SEQ ID NO: 5747 - DNA, 23 bp, Homo sapiens
gcagccatacatcctctggaggg

SEQ ID NO: 5748 - DNA, 23 bp, Homo sapiens
gcagccatacatcctctggatgg

SEQ ID NO: 5749 - DNA, 23 bp, Homo sapiens
gcagccatacattatctggatgg

SEQ ID NO: 5750 - DNA, 23 bp, Homo sapiens
gcagcccctcatgctgtacatgg

SEQ ID NO: 5751 - DNA, 23 bp, Homo sapiens
gcagcccctcgtgctgaacatgg

SEQ ID NO: 5752 - DNA, 23 bp, Homo sapiens
gcagcccctcgtgctgcacatgg

SEQ ID NO: 5753 - DNA, 23 bp, Homo sapiens
gcagcccctcgtgctgcatatgg

SEQ ID NO: 5754 - DNA, 23 bp, Homo sapiens
gcagccgtacatccactggaggg

SEQ ID NO: 5755 - DNA, 23 bp, Homo sapiens
gcagccgtacatcctctggaggg

SEQ ID NO: 5756 - DNA, 23 bp, Homo sapiens
gcagccgtacatgctctggaggg

SEQ ID NO: 5757 - DNA, 23 bp, Homo sapiens
gcagcggagagcctacctggagg

SEQ ID NO: 5758 - DNA, 23 bp, Homo sapiens
gcagcggagagtctacctggagg

SEQ ID NO: 5759 - DNA, 23 bp, Homo sapiens
gcagctgagaacctacctggagg

SEQ ID NO: 5760 - DNA, 23 bp, Homo sapiens
gcagctgagagcctacctggagg

SEQ ID NO: 5761 - DNA, 23 bp, Homo sapiens
gcagctgtgatggtgccttctgg

SEQ ID NO: 5762 - DNA, 23 bp, Homo sapiens
gcagctgtggtggtaccttctgg

SEQ ID NO: 5763 - DNA, 23 bp, Homo sapiens
gcagctgtggtggtgccttctgg

SEQ ID NO: 5764 - DNA, 23 bp, Homo sapiens
gcaggacagagcctacctggagg

SEQ ID NO: 5765 - DNA, 23 bp, Homo sapiens
gcaggaccatgagatcttagagg

SEQ ID NO: 5766 - DNA, 23 bp, Homo sapiens
gcaggacgcctacgacggcaagg

SEQ ID NO: 5767 - DNA, 23 bp, Homo sapiens
gcaggacgcttacgacggcaagg

SEQ ID NO: 5768 - DNA, 23 bp, Homo sapiens
gcaggagaggcctgagtattggg

SEQ ID NO: 5769 - DNA, 23 bp, Homo sapiens
gcaggaggagccggagtattggg

SEQ ID NO: 5770 - DNA, 23 bp, Homo sapiens
gcaggaggggccggaatattggg

SEQ ID NO: 5771 - DNA, 23 bp, Homo sapiens
gcaggaggggccggagtattggg

SEQ ID NO: 5772 - DNA, 23 bp, Homo sapiens
gcaggagggtccggagtattggg

SEQ ID NO: 5773 - DNA, 23 bp, Homo sapiens
gcaggcgggggcgcaggacccgg

SEQ ID NO: 5774 - DNA, 23 bp, Homo sapiens
gcaggcgggggctcaggacccgg

SEQ ID NO: 5775 - DNA, 23 bp, Homo sapiens
gcagggaaatggcctctgtaggg

SEQ ID NO: 5776 - DNA, 23 bp, Homo sapiens
gcagggaaatggcctctgtgggg

SEQ ID NO: 5777 - DNA, 23 bp, Homo sapiens
gcagggaacacttctacctgggg

SEQ ID NO: 5778 - DNA, 23 bp, Homo sapiens
gcagggccatgagatcttagagg

SEQ ID NO: 5779 - DNA, 23 bp, Homo sapiens
gcagggccatgcaatcttagggg

SEQ ID NO: 5780 - DNA, 23 bp, Homo sapiens
gcagggccatgcgatcttagggg

SEQ ID NO: 5781 - DNA, 23 bp, Homo sapiens
gcagggccatgtgatcttagggg

SEQ ID NO: 5782 - DNA, 23 bp, Homo sapiens
gcagggtccccaggtccactcgg

SEQ ID NO: 5783 - DNA, 23 bp, Homo sapiens
gcagggtccccaggttcgctcgg

SEQ ID NO: 5784 - DNA, 23 bp, Homo sapiens
gcagggtccccaggttctctcgg

SEQ ID NO: 5785 - DNA, 23 bp, Homo sapiens
gcagggtccgcaggctctctcgg

SEQ ID NO: 5786 - DNA, 23 bp, Homo sapiens
gcagggtccgcaggtcctctcgg

SEQ ID NO: 5787 - DNA, 23 bp, Homo sapiens
gcaggttccgcaggctcactcgg

SEQ ID NO: 5788 - DNA, 23 bp, Homo sapiens
gcaggttccgcaggctctctcgg

SEQ ID NO: 5789 - DNA, 23 bp, Homo sapiens
gcaggttccgcaggttcactcgg

SEQ ID NO: 5790 - DNA, 23 bp, Homo sapiens
gcaggttccgcaggttctctcgg

SEQ ID NO: 5791 - DNA, 23 bp, Homo sapiens
gcagtggagagcctacctggagg

SEQ ID NO: 5792 - DNA, 23 bp, Homo sapiens
gcagtggtcaaagtggtcaaagg

SEQ ID NO: 5793 - DNA, 23 bp, Homo sapiens
gcagttgagagcctacctggagg

SEQ ID NO: 5794 - DNA, 23 bp, Homo sapiens
gcagtttccgcaggttcactcgg

SEQ ID NO: 5795 - DNA, 23 bp, Homo sapiens
gcatggcctcccacgaggagggg

SEQ ID NO: 5796 - DNA, 23 bp, Homo sapiens
gcatgtacggctgcgacgtgggg

SEQ ID NO: 5797 - DNA, 23 bp, Homo sapiens
gcatgtggccatcttgagaatgg

SEQ ID NO: 5798 - DNA, 23 bp, Homo sapiens
gcatgtggccattttgaggatgg

SEQ ID NO: 5799 - DNA, 23 bp, Homo sapiens
gcatgtgtctgtgttcatgtagg

SEQ ID NO: 5800 - DNA, 23 bp, Homo sapiens
gcatgtgtctgtgttcgtgtagg

SEQ ID NO: 5801 - DNA, 23 bp, Homo sapiens
gcatgtgtctgtgttcttgtagg

SEQ ID NO: 5802 - DNA, 23 bp, Homo sapiens
gcattggggaggcgcagcattgg

SEQ ID NO: 5803 - DNA, 23 bp, Homo sapiens
gcattggggaggcgcagcgttgg

SEQ ID NO: 5804 - DNA, 23 bp, Homo sapiens
gcattggggaggcgccgcgttgg

SEQ ID NO: 5805 - DNA, 23 bp, Homo sapiens
gccacctggcccgtccgtggggg

SEQ ID NO: 5806 - DNA, 23 bp, Homo sapiens
gccagaaacgatgcccaagttgg

SEQ ID NO: 5807 - DNA, 23 bp, Homo sapiens
gccagaccctcctcccggcgcgg

SEQ ID NO: 5808 - DNA, 23 bp, Homo sapiens
gccagcaacaatgcccacgatgg

SEQ ID NO: 5809 - DNA, 23 bp, Homo sapiens
gccagcaacgatgcccacgatgg

SEQ ID NO: 5810 - DNA, 23 bp, Homo sapiens
gccagcaacgatgcccatgatgg

SEQ ID NO: 5811 - DNA, 23 bp, Homo sapiens
gccagcaaggatgcccacgatgg

SEQ ID NO: 5812 - DNA, 23 bp, Homo sapiens
gccagcaatgatgcccacaatgg

SEQ ID NO: 5813 - DNA, 23 bp, Homo sapiens
gccagcaatgatgcccacgatgg

SEQ ID NO: 5814 - DNA, 23 bp, Homo sapiens
gccaggacagccaggacagctgg

SEQ ID NO: 5815 - DNA, 23 bp, Homo sapiens
gccagggtctcacatcatccagg

SEQ ID NO: 5816 - DNA, 23 bp, Homo sapiens
gccaggtcacccacagtctccgg

SEQ ID NO: 5817 - DNA, 23 bp, Homo sapiens
gccaggtcagggctgaggcttgg

SEQ ID NO: 5818 - DNA, 23 bp, Homo sapiens
gccaggtcgcccacagtctccgg

SEQ ID NO: 5819 - DNA, 23 bp, Homo sapiens
gccaggtggcccacagtctccgg

SEQ ID NO: 5820 - DNA, 23 bp, Homo sapiens
gccagtgagtgaccccggcccgg

SEQ ID NO: 5821 - DNA, 23 bp, Homo sapiens
gccatgtcccggcccggccgcgg

SEQ ID NO: 5822 - DNA, 23 bp, Homo sapiens
gccatgtcccggcctggccgcgg

SEQ ID NO: 5823 - DNA, 23 bp, Homo sapiens
gccattctccattcaacggaggg

SEQ ID NO: 5824 - DNA, 23 bp, Homo sapiens
gccattctccattcaagggaggg

SEQ ID NO: 5825 - DNA, 23 bp, Homo sapiens
gcccacaggagacgtgggacagg

SEQ ID NO: 5826 - DNA, 23 bp, Homo sapiens
gcccagccccgaccaacccgggg

SEQ ID NO: 5827 - DNA, 23 bp, Homo sapiens
gcccagggcccagcacctcaggg

SEQ ID NO: 5828 - DNA, 23 bp, Homo sapiens
gccccgccccgaccaacccgcgg

SEQ ID NO: 5829 - DNA, 23 bp, Homo sapiens
gccccgccccgaccaacccgggg

SEQ ID NO: 5830 - DNA, 23 bp, Homo sapiens
gccccgccccgaccaacctgggg

SEQ ID NO: 5831 - DNA, 23 bp, Homo sapiens
gccccgccccgacccacccgggg

SEQ ID NO: 5832 - DNA, 23 bp, Homo sapiens
gccccgccccgcccaacccgcgg

SEQ ID NO: 5833 - DNA, 23 bp, Homo sapiens
gccccgccctgaccaacccgcgg

SEQ ID NO: 5834 - DNA, 23 bp, Homo sapiens
gcccgacccacctccctgcgcgg

SEQ ID NO: 5835 - DNA, 23 bp, Homo sapiens
gcccgaccctcctccaggcgcgg

SEQ ID NO: 5836 - DNA, 23 bp, Homo sapiens
gcccgaccctcctcccggcgcgg

SEQ ID NO: 5837 - DNA, 23 bp, Homo sapiens
gcccgaccctcctccctgcgcgg

SEQ ID NO: 5838 - DNA, 23 bp, Homo sapiens
gcccgaccctcgtcccggcgcgg

SEQ ID NO: 5839 - DNA, 23 bp, Homo sapiens
gcccgcaggagacgtgggacagg

SEQ ID NO: 5840 - DNA, 23 bp, Homo sapiens
gcccggccccgaccaacccgggg

SEQ ID NO: 5841 - DNA, 23 bp, Homo sapiens
gcccgtccgtaggggatgagggg

SEQ ID NO: 5842 - DNA, 23 bp, Homo sapiens
gcccgtccgtgggggatgagagg

SEQ ID NO: 5843 - DNA, 23 bp, Homo sapiens
gcccgtccgtgggggatgagggg

SEQ ID NO: 5844 - DNA, 23 bp, Homo sapiens
gccctcaggagacgtgggacagg

SEQ ID NO: 5845 - DNA, 23 bp, Homo sapiens
gccctcccttgaatggagaatgg

SEQ ID NO: 5846 - DNA, 23 bp, Homo sapiens
gccctccgttgaatggagaatgg

SEQ ID NO: 5847 - DNA, 23 bp, Homo sapiens
gccctcctcctgctgctctcggg

SEQ ID NO: 5848 - DNA, 23 bp, Homo sapiens
gccctgacccagaccagggcggg

SEQ ID NO: 5849 - DNA, 23 bp, Homo sapiens
gccctgacccagacctgggcagg

SEQ ID NO: 5850 - DNA, 23 bp, Homo sapiens
gccctgacccagacctgggcggg

SEQ ID NO: 5851 - DNA, 23 bp, Homo sapiens
gccctgaccgagacctgggccgg

SEQ ID NO: 5852 - DNA, 23 bp, Homo sapiens
gccctgaccgagacctgggctgg

SEQ ID NO: 5853 - DNA, 23 bp, Homo sapiens
gccctgatcgagacctggaccgg

SEQ ID NO: 5854 - DNA, 23 bp, Homo sapiens
gccctgatcgagacctgggccgg

SEQ ID NO: 5855 - DNA, 23 bp, Homo sapiens
gccgaaggactcagaaaagctgg

SEQ ID NO: 5856 - DNA, 23 bp, Homo sapiens
gccgaaggactcagaaaagttgg

SEQ ID NO: 5857 - DNA, 23 bp, Homo sapiens
gccgcgcagggaggagggtcggg

SEQ ID NO: 5858 - DNA, 23 bp, Homo sapiens
gccgcgcagggaggtgggtcggg

SEQ ID NO: 5859 - DNA, 23 bp, Homo sapiens
gccgcgccgggacgagggtcggg

SEQ ID NO: 5860 - DNA, 23 bp, Homo sapiens
gccgcgccgggaggagggtcggg

SEQ ID NO: 5861 - DNA, 23 bp, Homo sapiens
gccgcgccgggaggagggtctgg

SEQ ID NO: 5862 - DNA, 23 bp, Homo sapiens
gccgcgcctggaggagggtcggg

SEQ ID NO: 5863 - DNA, 23 bp, Homo sapiens
gccgggagatctacgggagatgg

SEQ ID NO: 5864 - DNA, 23 bp, Homo sapiens
gccgggccaggacacggatgtgg

SEQ ID NO: 5865 - DNA, 23 bp, Homo sapiens
gccgggccgggacacggatgtgg

SEQ ID NO: 5866 - DNA, 23 bp, Homo sapiens
gccgggtcagggctgaggcttgg

SEQ ID NO: 5867 - DNA, 23 bp, Homo sapiens
gccgggtcgcccacagtctccgg

SEQ ID NO: 5868 - DNA, 23 bp, Homo sapiens
gccggtgagtgaccccagcccgg

SEQ ID NO: 5869 - DNA, 23 bp, Homo sapiens
gccggtgagtgaccccgcccggg

SEQ ID NO: 5870 - DNA, 23 bp, Homo sapiens
gccggtgagtgaccccggcccgg

SEQ ID NO: 5871 - DNA, 23 bp, Homo sapiens
gccggtgagtgaccccggccggg

SEQ ID NO: 5872 - DNA, 23 bp, Homo sapiens
gccggtgagtgaccccggcctgg

SEQ ID NO: 5873 - DNA, 23 bp, Homo sapiens
gccggtgagtgcgggtcggcagg

SEQ ID NO: 5874 - DNA, 23 bp, Homo sapiens
gccggtgagtgcgggtcgggagg

SEQ ID NO: 5875 - DNA, 23 bp, Homo sapiens
gccggtttcattttcagtttagg

SEQ ID NO: 5876 - DNA, 23 bp, Homo sapiens
gccgtccgtgggggatgaggagg

SEQ ID NO: 5877 - DNA, 23 bp, Homo sapiens
gccgtccgtgggggatggggagg

SEQ ID NO: 5878 - DNA, 23 bp, Homo sapiens
gccgtgtcccggcccggccgcgg

SEQ ID NO: 5879 - DNA, 23 bp, Homo sapiens
gcctaaaccgaaaatgaaaccgg

SEQ ID NO: 5880 - DNA, 23 bp, Homo sapiens
gcctaaactgaaaatgaaaccgg

SEQ ID NO: 5881 - DNA, 23 bp, Homo sapiens
gcctcaactgaaaatgaaaccgg

SEQ ID NO: 5882 - DNA, 23 bp, Homo sapiens
gcctcacactcagtgtgtttggg

SEQ ID NO: 5883 - DNA, 23 bp, Homo sapiens
gcctcggggtggatctcagacgg

SEQ ID NO: 5884 - DNA, 23 bp, Homo sapiens
gcctctgccgggaggagcgaggg

SEQ ID NO: 5885 - DNA, 23 bp, Homo sapiens
gcctctgcggagaggagcgaggg

SEQ ID NO: 5886 - DNA, 23 bp, Homo sapiens
gcctctgcggggagaagcaaggg

SEQ ID NO: 5887 - DNA, 23 bp, Homo sapiens
gcctctggggagaggagcgaggg

SEQ ID NO: 5888 - DNA, 23 bp, Homo sapiens
gcctctgtagggaggagcaaggg

SEQ ID NO: 5889 - DNA, 23 bp, Homo sapiens
gcctctgtggggagaagcaacgg

SEQ ID NO: 5890 - DNA, 23 bp, Homo sapiens
gcctctgtggggagaagcaaggg

SEQ ID NO: 5891 - DNA, 23 bp, Homo sapiens
gcctctgtggggaggagagaggg

SEQ ID NO: 5892 - DNA, 23 bp, Homo sapiens
gcctctgtggggaggagcgaggg

SEQ ID NO: 5893 - DNA, 23 bp, Homo sapiens
gcctgagacagctgcctgtgtgg

SEQ ID NO: 5894 - DNA, 23 bp, Homo sapiens
gcctgatgtgtgttgggtgttgg

SEQ ID NO: 5895 - DNA, 23 bp, Homo sapiens
gcctgcatccgctggtgtctggg

SEQ ID NO: 5896 - DNA, 23 bp, Homo sapiens
gcctggagtagaacaaaaacagg

SEQ ID NO: 5897 - DNA, 23 bp, Homo sapiens
gcctggagtagaaccaaaacagg

SEQ ID NO: 5898 - DNA, 23 bp, Homo sapiens
gcctggccctgaccgagacctgg

SEQ ID NO: 5899 - DNA, 23 bp, Homo sapiens
gcctgtgtccaggctggtctggg

SEQ ID NO: 5900 - DNA, 23 bp, Homo sapiens
gccttgatggttgtggtgttggg

SEQ ID NO: 5901 - DNA, 23 bp, Homo sapiens
gcctttgcagaaacaaagtcagg

SEQ ID NO: 5902 - DNA, 23 bp, Homo sapiens
gcgaacctggggaccctgcgcgg

SEQ ID NO: 5903 - DNA, 23 bp, Homo sapiens
gcgacccggcccgtccgtggggg

SEQ ID NO: 5904 - DNA, 23 bp, Homo sapiens
gcgacccgggccgtacgtggggg

SEQ ID NO: 5905 - DNA, 23 bp, Homo sapiens
gcgacccgggccgtccgtggggg

SEQ ID NO: 5906 - DNA, 23 bp, Homo sapiens
gcgaccgcgaagacactgattgg

SEQ ID NO: 5907 - DNA, 23 bp, Homo sapiens
gcgaccgcgacgacactgattgg

SEQ ID NO: 5908 - DNA, 23 bp, Homo sapiens
gcgacctggcccgtccgtagggg

SEQ ID NO: 5909 - DNA, 23 bp, Homo sapiens
gcgacctggcccgtccgtggggg

SEQ ID NO: 5910 - DNA, 23 bp, Homo sapiens
gcgacgccgcgagtccaagaggg

SEQ ID NO: 5911 - DNA, 23 bp, Homo sapiens
gcgacgccgcgagtccgagaggg

SEQ ID NO: 5912 - DNA, 23 bp, Homo sapiens
gcgaggacggtgagtgaccccgg

SEQ ID NO: 5913 - DNA, 23 bp, Homo sapiens
gcgaggccagtgagtgaccccgg

SEQ ID NO: 5914 - DNA, 23 bp, Homo sapiens
gcgaggccggtgagtgaccccgg

SEQ ID NO: 5915 - DNA, 23 bp, Homo sapiens
gcgaggggcccgcccggcgaggg

SEQ ID NO: 5916 - DNA, 23 bp, Homo sapiens
gcgaggggccctcccggcgaggg

SEQ ID NO: 5917 - DNA, 23 bp, Homo sapiens
gcgatcaggaaggcgccccgtgg

SEQ ID NO: 5918 - DNA, 23 bp, Homo sapiens
gcgatcagggaggcgccccgtgg

SEQ ID NO: 5919 - DNA, 23 bp, Homo sapiens
gcgatcaggtaggcgccccgtgg

SEQ ID NO: 5920 - DNA, 23 bp, Homo sapiens
gcgcagggaggagggtcgggcgg

SEQ ID NO: 5921 - DNA, 23 bp, Homo sapiens
gcgcagggaggtgggtcgggcgg

SEQ ID NO: 5922 - DNA, 23 bp, Homo sapiens
gcgcaggtaccaggggcagtggg

SEQ ID NO: 5923 - DNA, 23 bp, Homo sapiens
gcgccatgacggccatcctcggg

SEQ ID NO: 5924 - DNA, 23 bp, Homo sapiens
gcgccatggatagagcaagaggg

SEQ ID NO: 5925 - DNA, 23 bp, Homo sapiens
gcgccatggatagagcaggaggg

SEQ ID NO: 5926 - DNA, 23 bp, Homo sapiens
gcgcccgcggctccatcctccgg

SEQ ID NO: 5927 - DNA, 23 bp, Homo sapiens
gcgcccgcggctccatcctctgg

SEQ ID NO: 5928 - DNA, 23 bp, Homo sapiens
gcgcccgcggctccatcttctgg

SEQ ID NO: 5929 - DNA, 23 bp, Homo sapiens
gcgccgggaggagggtcgggcgg

SEQ ID NO: 5930 - DNA, 23 bp, Homo sapiens
gcgccgggaggagggtcgggtgg

SEQ ID NO: 5931 - DNA, 23 bp, Homo sapiens
gcgccgggaggagggtctggcgg

SEQ ID NO: 5932 - DNA, 23 bp, Homo sapiens
gcgccgtggatagagcaagaggg

SEQ ID NO: 5933 - DNA, 23 bp, Homo sapiens
gcgccgtggatagagcaggaggg

SEQ ID NO: 5934 - DNA, 23 bp, Homo sapiens
gcgccgtgggtggagcaggaggg

SEQ ID NO: 5935 - DNA, 23 bp, Homo sapiens
gcgcctacctgatcgcctgtagg

SEQ ID NO: 5936 - DNA, 23 bp, Homo sapiens
gcgcctccccaatgcagacaagg

SEQ ID NO: 5937 - DNA, 23 bp, Homo sapiens
gcgcctccccaatgcagacacgg

SEQ ID NO: 5938 - DNA, 23 bp, Homo sapiens
gcgcctccccaatgcagacgcgg

SEQ ID NO: 5939 - DNA, 23 bp, Homo sapiens
gcgcctccccagtgcagacacgg

SEQ ID NO: 5940 - DNA, 23 bp, Homo sapiens
gcgcctccccattgcagacgcgg

SEQ ID NO: 5941 - DNA, 23 bp, Homo sapiens
gcgcctggaggagggtcgggcgg

SEQ ID NO: 5942 - DNA, 23 bp, Homo sapiens
gcgcgatccgcaggctctctcgg

SEQ ID NO: 5943 - DNA, 23 bp, Homo sapiens
gcgcgatccgcaggttctctcgg

SEQ ID NO: 5944 - DNA, 23 bp, Homo sapiens
gcgcgggtaccaggggcagtggg

SEQ ID NO: 5945 - DNA, 23 bp, Homo sapiens
gcgcggtgcgcaggttctctcgg

SEQ ID NO: 5946 - DNA, 23 bp, Homo sapiens
gcgctgggtgatctgagccgcgg

SEQ ID NO: 5947 - DNA, 23 bp, Homo sapiens
gcgctggtaccaggggcagtggg

SEQ ID NO: 5948 - DNA, 23 bp, Homo sapiens
gcggaacccgcccagaccctcgg

SEQ ID NO: 5949 - DNA, 23 bp, Homo sapiens
gcggagttggggaatccccaagg

SEQ ID NO: 5950 - DNA, 23 bp, Homo sapiens
gcggccaggccgggacatggcgg

SEQ ID NO: 5951 - DNA, 23 bp, Homo sapiens
gcggccgggccgggacacagcgg

SEQ ID NO: 5952 - DNA, 23 bp, Homo sapiens
gcggccgggccgggacacggagg

SEQ ID NO: 5953 - DNA, 23 bp, Homo sapiens
gcggccgggccgggacacggcgg

SEQ ID NO: 5954 - DNA, 23 bp, Homo sapiens
gcggccgggccgggacatggagg

SEQ ID NO: 5955 - DNA, 23 bp, Homo sapiens
gcggccgggccgggacatggcgg

SEQ ID NO: 5956 - DNA, 23 bp, Homo sapiens
gcggcctcgggggcggatctcgg

SEQ ID NO: 5957 - DNA, 23 bp, Homo sapiens
gcggctgggccgggacacagcgg

SEQ ID NO: 5958 - DNA, 23 bp, Homo sapiens
gcggctgtggtggtaccttctgg

SEQ ID NO: 5959 - DNA, 23 bp, Homo sapiens
gcggctgtggtggtgccttctgg

SEQ ID NO: 5960 - DNA, 23 bp, Homo sapiens
gcgggacggggctgaccacgggg

SEQ ID NO: 5961 - DNA, 23 bp, Homo sapiens
gcgggagccgtgggtggagcagg

SEQ ID NO: 5962 - DNA, 23 bp, Homo sapiens
gcgggcaccgtggatagagcagg

SEQ ID NO: 5963 - DNA, 23 bp, Homo sapiens
gcgggcgccatggatagagcagg

SEQ ID NO: 5964 - DNA, 23 bp, Homo sapiens
gcgggcgccgtggatagagcagg

SEQ ID NO: 5965 - DNA, 23 bp, Homo sapiens
gcgggcgccgtgggtggagcagg

SEQ ID NO: 5966 - DNA, 23 bp, Homo sapiens
gcggggcacacttctacctgggg

SEQ ID NO: 5967 - DNA, 23 bp, Homo sapiens
gcggggcggggcggggctcgggg

SEQ ID NO: 5968 - DNA, 23 bp, Homo sapiens
gcggggcggggctcgggggacgg

SEQ ID NO: 5969 - DNA, 23 bp, Homo sapiens
gcggggggggtggggtggggagg

SEQ ID NO: 5970 - DNA, 23 bp, Homo sapiens
gcgggtcccgcggcctcaggggg

SEQ ID NO: 5971 - DNA, 23 bp, Homo sapiens
gcgggtgagtgcggggtcgtggg

SEQ ID NO: 5972 - DNA, 23 bp, Homo sapiens
gcgggttgggcggggcggggcgg

SEQ ID NO: 5973 - DNA, 23 bp, Homo sapiens
gcgggttggtcagggcggggcgg

SEQ ID NO: 5974 - DNA, 23 bp, Homo sapiens
gcgggttggtcggggcggggcgg

SEQ ID NO: 5975 - DNA, 23 bp, Homo sapiens
gcgtcctgggggggtctgtcagg

SEQ ID NO: 5976 - DNA, 23 bp, Homo sapiens
gcgtctccttcccattcttcagg

SEQ ID NO: 5977 - DNA, 23 bp, Homo sapiens
gcgtctccttcccgttctccagg

SEQ ID NO: 5978 - DNA, 23 bp, Homo sapiens
gcgtctccttcccgttcttcagg

SEQ ID NO: 5979 - DNA, 23 bp, Homo sapiens
gcgtctgtggtggtgccttctgg

SEQ ID NO: 5980 - DNA, 23 bp, Homo sapiens
gcgtcttcttcccgttctccagg

SEQ ID NO: 5981 - DNA, 23 bp, Homo sapiens
gcgtcttcttcctgttctccagg

SEQ ID NO: 5982 - DNA, 23 bp, Homo sapiens
gcgtcttgggggcgtctgtcagg

SEQ ID NO: 5983 - DNA, 23 bp, Homo sapiens
gcgtcttgggggggtctgtcagg

SEQ ID NO: 5984 - DNA, 23 bp, Homo sapiens
gcgtgggaagagggtcatggtgg

SEQ ID NO: 5985 - DNA, 23 bp, Homo sapiens
gcgtgtccttcccgttctccagg

SEQ ID NO: 5986 - DNA, 23 bp, Homo sapiens
gcgtttccttcccgttctccagg

SEQ ID NO: 5987 - DNA, 23 bp, Homo sapiens
gcgttttgggggcgtctgtcagg

SEQ ID NO: 5988 - DNA, 23 bp, Homo sapiens
gctaaggacagaccttaggaggg

SEQ ID NO: 5989 - DNA, 23 bp, Homo sapiens
gctatggggtttctttccattgg

SEQ ID NO: 5990 - DNA, 23 bp, Homo sapiens
gctatggggtttctttgcattgg

SEQ ID NO: 5991 - DNA, 23 bp, Homo sapiens
gctatggggtttctttgcgttgg

SEQ ID NO: 5992 - DNA, 23 bp, Homo sapiens
gctcagggcccagcacctcaggg

SEQ ID NO: 5993 - DNA, 23 bp, Homo sapiens
gctcaggtagggaaggggtgagg

SEQ ID NO: 5994 - DNA, 23 bp, Homo sapiens
gctccctccttttccacctgtgg

SEQ ID NO: 5995 - DNA, 23 bp, Homo sapiens
gctccctccttttctaactgtgg

SEQ ID NO: 5996 - DNA, 23 bp, Homo sapiens
gctccctccttttctatctgtgg

SEQ ID NO: 5997 - DNA, 23 bp, Homo sapiens
gctcctttctggtagctcacagg

SEQ ID NO: 5998 - DNA, 23 bp, Homo sapiens
gctcctttctggtatctcacagg

SEQ ID NO: 5999 - DNA, 23 bp, Homo sapiens
gctctcgccggtcgagggtctgg

SEQ ID NO: 6000 - DNA, 23 bp, Homo sapiens
gctctcgccggtcgagggtttgg

SEQ ID NO: 6001 - DNA, 23 bp, Homo sapiens
gctctctccggccgagggtctgg

SEQ ID NO: 6002 - DNA, 23 bp, Homo sapiens
gctctctccggtcgagggtctgg

SEQ ID NO: 6003 - DNA, 23 bp, Homo sapiens
gctctgaccaggtcctgttttgg

SEQ ID NO: 6004 - DNA, 23 bp, Homo sapiens
gctcttcctcctccacatcacgg

SEQ ID NO: 6005 - DNA, 23 bp, Homo sapiens
gctcttcttcctccacatcacgg

SEQ ID NO: 6006 - DNA, 23 bp, Homo sapiens
gctgaagaactcagaaaagctgg

SEQ ID NO: 6007 - DNA, 23 bp, Homo sapiens
gctgaaggactcagaagtgctgg

SEQ ID NO: 6008 - DNA, 23 bp, Homo sapiens
gctgagagactcagaagtgctgg

SEQ ID NO: 6009 - DNA, 23 bp, Homo sapiens
gctgagggactcagaagtgctgg

SEQ ID NO: 6010 - DNA, 23 bp, Homo sapiens
gctgcaagtaagtatgaaggagg

SEQ ID NO: 6011 - DNA, 23 bp, Homo sapiens
gctgcagcgcacgggtaccaggg

SEQ ID NO: 6012 - DNA, 23 bp, Homo sapiens
gctgcagcgcacgggtaccgggg

SEQ ID NO: 6013 - DNA, 23 bp, Homo sapiens
gctgcagcgcgcaggtaccaggg

SEQ ID NO: 6014 - DNA, 23 bp, Homo sapiens
gctgcagcgcgcgggtaccaggg

SEQ ID NO: 6015 - DNA, 23 bp, Homo sapiens
gctgcaggactcagaaaagctgg

SEQ ID NO: 6016 - DNA, 23 bp, Homo sapiens
gctgccacgtggggtcggacggg

SEQ ID NO: 6017 - DNA, 23 bp, Homo sapiens
gctgcgacctggggccccacggg

SEQ ID NO: 6018 - DNA, 23 bp, Homo sapiens
gctgcgacctggggcccgacggg

SEQ ID NO: 6019 - DNA, 23 bp, Homo sapiens
gctgcgacctggggccggacggg

SEQ ID NO: 6020 - DNA, 23 bp, Homo sapiens
gctgcgacgtggggcccgacggg

SEQ ID NO: 6021 - DNA, 23 bp, Homo sapiens
gctgcgacgtggggccggacggg

SEQ ID NO: 6022 - DNA, 23 bp, Homo sapiens
gctgcgacgtggggtcggacggg

SEQ ID NO: 6023 - DNA, 23 bp, Homo sapiens
gctgcgacgtggggtcggactgg

SEQ ID NO: 6024 - DNA, 23 bp, Homo sapiens
gctggagcgcgcgggtaccaggg

SEQ ID NO: 6025 - DNA, 23 bp, Homo sapiens
gctggagcgcgctggtaccaggg

SEQ ID NO: 6026 - DNA, 23 bp, Homo sapiens
gctggggtaaggaggggaatggg

SEQ ID NO: 6027 - DNA, 23 bp, Homo sapiens
gctgggtaggcccataattgtgg

SEQ ID NO: 6028 - DNA, 23 bp, Homo sapiens
gctgggtaggcccatgattgtgg

SEQ ID NO: 6029 - DNA, 23 bp, Homo sapiens
gctgggtaggctcataattgtgg

SEQ ID NO: 6030 - DNA, 23 bp, Homo sapiens
gctgggtcagggctgaggcttgg

SEQ ID NO: 6031 - DNA, 23 bp, Homo sapiens
gctgggtcggcccatgattgtgg

SEQ ID NO: 6032 - DNA, 23 bp, Homo sapiens
gctgggtgggcccatgattgtgg

SEQ ID NO: 6033 - DNA, 23 bp, Homo sapiens
gctgtgtcccggcccagccgcgg

SEQ ID NO: 6034 - DNA, 23 bp, Homo sapiens
gctgtgtcccggcccggccgcgg

SEQ ID NO: 6035 - DNA, 23 bp, Homo sapiens
gcttcacactcaatatgtgtggg

SEQ ID NO: 6036 - DNA, 23 bp, Homo sapiens
gcttcacactcaatgtgtgtggg

SEQ ID NO: 6037 - DNA, 23 bp, Homo sapiens
gcttgaaaaggtgagattcttgg

SEQ ID NO: 6038 - DNA, 23 bp, Homo sapiens
gcttgtaaaggtgagattctggg

SEQ ID NO: 6039 - DNA, 23 bp, Homo sapiens
gcttgtacttctgtgtctcccgg

SEQ ID NO: 6040 - DNA, 23 bp, Homo sapiens
gcttgtagttctgtgtctcccgg

SEQ ID NO: 6041 - DNA, 23 bp, Homo sapiens
gcttgtccttcccgttctccagg

SEQ ID NO: 6042 - DNA, 23 bp, Homo sapiens
ggaaaagaggagaaggtgagggg

SEQ ID NO: 6043 - DNA, 23 bp, Homo sapiens
ggaaaagaggggaaggtgagggg

SEQ ID NO: 6044 - DNA, 23 bp, Homo sapiens
ggaaacttctctggggtccaagg

SEQ ID NO: 6045 - DNA, 23 bp, Homo sapiens
ggaaaggaagggaagatgagggg

SEQ ID NO: 6046 - DNA, 23 bp, Homo sapiens
ggaaaggaggagaaggtgagggg

SEQ ID NO: 6047 - DNA, 23 bp, Homo sapiens
ggaaaggaggggaagacgagggg

SEQ ID NO: 6048 - DNA, 23 bp, Homo sapiens
ggaaaggaggggaagatgagggg

SEQ ID NO: 6049 - DNA, 23 bp, Homo sapiens
ggaaaggaggggaaggtgagggg

SEQ ID NO: 6050 - DNA, 23 bp, Homo sapiens
ggaaagttcgagtctctgagcgg

SEQ ID NO: 6051 - DNA, 23 bp, Homo sapiens
ggaaagttcgagtctctgagtgg

SEQ ID NO: 6052 - DNA, 23 bp, Homo sapiens
ggaacagctcaggtggagaaggg

SEQ ID NO: 6053 - DNA, 23 bp, Homo sapiens
ggaaccgtgactttcctctcagg

SEQ ID NO: 6054 - DNA, 23 bp, Homo sapiens
ggaacctcagagtcactctctgg

SEQ ID NO: 6055 - DNA, 23 bp, Homo sapiens
ggaagaaaatgccctatgagggg

SEQ ID NO: 6056 - DNA, 23 bp, Homo sapiens
ggaagaaaatgccctgtgagggg

SEQ ID NO: 6057 - DNA, 23 bp, Homo sapiens
ggaagaaaatgtcctgtgagggg

SEQ ID NO: 6058 - DNA, 23 bp, Homo sapiens
ggaagaagaagtgaaactcaggg

SEQ ID NO: 6059 - DNA, 23 bp, Homo sapiens
ggaagagctcaggtagggaaggg

SEQ ID NO: 6060 - DNA, 23 bp, Homo sapiens
ggaagagctcaggtggagaaggg

SEQ ID NO: 6061 - DNA, 23 bp, Homo sapiens
ggaagagctcaggtggggaaggg

SEQ ID NO: 6062 - DNA, 23 bp, Homo sapiens
ggaagagttcaggtagggaaggg

SEQ ID NO: 6063 - DNA, 23 bp, Homo sapiens
ggaagcaccacccacaatcatgg

SEQ ID NO: 6064 - DNA, 23 bp, Homo sapiens
ggaagcaccacccacaattatgg

SEQ ID NO: 6065 - DNA, 23 bp, Homo sapiens
ggaagcaccatccacaatcatgg

SEQ ID NO: 6066 - DNA, 23 bp, Homo sapiens
ggaagcaccatccacaattatgg

SEQ ID NO: 6067 - DNA, 23 bp, Homo sapiens
ggaagcaccgtccacaatcatgg

SEQ ID NO: 6068 - DNA, 23 bp, Homo sapiens
ggaagcaccttccacaatcatgg

SEQ ID NO: 6069 - DNA, 23 bp, Homo sapiens
ggaagcgcccgtcgggccccagg

SEQ ID NO: 6070 - DNA, 23 bp, Homo sapiens
ggaaggagccgcgggcgccatgg

SEQ ID NO: 6071 - DNA, 23 bp, Homo sapiens
ggaaggcgccccgtggcccctgg

SEQ ID NO: 6072 - DNA, 23 bp, Homo sapiens
ggaaggctccccactgcccctgg

SEQ ID NO: 6073 - DNA, 23 bp, Homo sapiens
ggaagtgtagaaatacctcatgg

SEQ ID NO: 6074 - DNA, 23 bp, Homo sapiens
ggacaagaggaattatggggtgg

SEQ ID NO: 6075 - DNA, 23 bp, Homo sapiens
ggacacctggggtagggaagggg

SEQ ID NO: 6076 - DNA, 23 bp, Homo sapiens
ggacacctggggtggggaagggg

SEQ ID NO: 6077 - DNA, 23 bp, Homo sapiens
ggacacctggtgtggggaagggg

SEQ ID NO: 6078 - DNA, 23 bp, Homo sapiens
ggacagatgtatcgccttgatgg

SEQ ID NO: 6079 - DNA, 23 bp, Homo sapiens
ggacaggaggaattagggggtgg

SEQ ID NO: 6080 - DNA, 23 bp, Homo sapiens
ggacaggaggaattatggggtgg

SEQ ID NO: 6081 - DNA, 23 bp, Homo sapiens
ggacattttcttcccacaggtgg

SEQ ID NO: 6082 - DNA, 23 bp, Homo sapiens
ggaccccgagacccttgacccgg

SEQ ID NO: 6083 - DNA, 23 bp, Homo sapiens
ggaccccgagacccttgccccgg

SEQ ID NO: 6084 - DNA, 23 bp, Homo sapiens
ggacccctgatcactatcctagg

SEQ ID NO: 6085 - DNA, 23 bp, Homo sapiens
ggacccctgatcagtattccagg

SEQ ID NO: 6086 - DNA, 23 bp, Homo sapiens
ggacccctgatcagtattctagg

SEQ ID NO: 6087 - DNA, 23 bp, Homo sapiens
ggaccctcctgctctatccacgg

SEQ ID NO: 6088 - DNA, 23 bp, Homo sapiens
ggaccggtgagtgcggggttggg

SEQ ID NO: 6089 - DNA, 23 bp, Homo sapiens
ggaccgtgacttttcctctcagg

SEQ ID NO: 6090 - DNA, 23 bp, Homo sapiens
ggacctgagctcctggaccgcgg

SEQ ID NO: 6091 - DNA, 23 bp, Homo sapiens
ggacctgcgctcctggaccgcgg

SEQ ID NO: 6092 - DNA, 23 bp, Homo sapiens
ggacggagccccgggcgccatgg

SEQ ID NO: 6093 - DNA, 23 bp, Homo sapiens
ggacggagccccgggcgccgtgg

SEQ ID NO: 6094 - DNA, 23 bp, Homo sapiens
ggacggatgtatcacctcgatgg

SEQ ID NO: 6095 - DNA, 23 bp, Homo sapiens
ggacggatgtatcaccttgatgg

SEQ ID NO: 6096 - DNA, 23 bp, Homo sapiens
ggacggatgtatcaccttggtgg

SEQ ID NO: 6097 - DNA, 23 bp, Homo sapiens
ggacggatgtatcgccttgatgg

SEQ ID NO: 6098 - DNA, 23 bp, Homo sapiens
ggacgggctccgcagatacctgg

SEQ ID NO: 6099 - DNA, 23 bp, Homo sapiens
ggacgggctgaccacgggggcgg

SEQ ID NO: 6100 - DNA, 23 bp, Homo sapiens
ggacgtttcgagtgtgtggtggg

SEQ ID NO: 6101 - DNA, 23 bp, Homo sapiens
ggactcccgagagcagcaggagg

SEQ ID NO: 6102 - DNA, 23 bp, Homo sapiens
ggactccgagacccttgtcccgg

SEQ ID NO: 6103 - DNA, 23 bp, Homo sapiens
ggacttcagaaccgggactgcgg

SEQ ID NO: 6104 - DNA, 23 bp, Homo sapiens
ggactttagaaccgggactgcgg

SEQ ID NO: 6105 - DNA, 23 bp, Homo sapiens
ggactttagaactgggaccacgg

SEQ ID NO: 6106 - DNA, 23 bp, Homo sapiens
ggactttagaactgggaccccgg

SEQ ID NO: 6107 - DNA, 23 bp, Homo sapiens
ggactttagaactgggaccgcgg

SEQ ID NO: 6108 - DNA, 23 bp, Homo sapiens
ggagaaatacctcatggagtggg

SEQ ID NO: 6109 - DNA, 23 bp, Homo sapiens
ggagaaatacctcatggattggg

SEQ ID NO: 6110 - DNA, 23 bp, Homo sapiens
ggagaacgggaaggacaagctgg

SEQ ID NO: 6111 - DNA, 23 bp, Homo sapiens
ggagaacgggaaggacacgctgg

SEQ ID NO: 6112 - DNA, 23 bp, Homo sapiens
ggagaagaagtgaaactcagggg

SEQ ID NO: 6113 - DNA, 23 bp, Homo sapiens
ggagaagaagtgaaactcgtggg

SEQ ID NO: 6114 - DNA, 23 bp, Homo sapiens
ggagaagcaacgggcccgcctgg

SEQ ID NO: 6115 - DNA, 23 bp, Homo sapiens
ggagaagcaaggggcccgcccgg

SEQ ID NO: 6116 - DNA, 23 bp, Homo sapiens
ggagaagcaaggggcccgcctgg

SEQ ID NO: 6117 - DNA, 23 bp, Homo sapiens
ggagaagcaaggggccctcctgg

SEQ ID NO: 6118 - DNA, 23 bp, Homo sapiens
ggagaccctcatgctgcacatgg

SEQ ID NO: 6119 - DNA, 23 bp, Homo sapiens
ggagacctttagcagggtcaggg

SEQ ID NO: 6120 - DNA, 23 bp, Homo sapiens
ggagagaggggaccgcaggcggg

SEQ ID NO: 6121 - DNA, 23 bp, Homo sapiens
ggagagcctacctggagggccgg

SEQ ID NO: 6122 - DNA, 23 bp, Homo sapiens
ggagagtctacctggagggccgg

SEQ ID NO: 6123 - DNA, 23 bp, Homo sapiens
ggagcaaggggaccgcaggcggg

SEQ ID NO: 6124 - DNA, 23 bp, Homo sapiens
ggagcagcagagagcctacctgg

SEQ ID NO: 6125 - DNA, 23 bp, Homo sapiens
ggagcagcggagagcctacctgg

SEQ ID NO: 6126 - DNA, 23 bp, Homo sapiens
ggagcagcggagagtctacctgg

SEQ ID NO: 6127 - DNA, 23 bp, Homo sapiens
ggagcagctgagaacctacctgg

SEQ ID NO: 6128 - DNA, 23 bp, Homo sapiens
ggagcagctgagagcctacctgg

SEQ ID NO: 6129 - DNA, 23 bp, Homo sapiens
ggagcaggacagagcctacctgg

SEQ ID NO: 6130 - DNA, 23 bp, Homo sapiens
ggagcagtggagagcctacctgg

SEQ ID NO: 6131 - DNA, 23 bp, Homo sapiens
ggagcagttgagagcctacctgg

SEQ ID NO: 6132 - DNA, 23 bp, Homo sapiens
ggagccccacttcatcgcagtgg

SEQ ID NO: 6133 - DNA, 23 bp, Homo sapiens
ggagccccgcttcatcaccgtgg

SEQ ID NO: 6134 - DNA, 23 bp, Homo sapiens
ggagccccgcttcatcgcagtgg

SEQ ID NO: 6135 - DNA, 23 bp, Homo sapiens
ggagccccgcttcatcgccgtgg

SEQ ID NO: 6136 - DNA, 23 bp, Homo sapiens
ggagccccgcttcatctcagtgg

SEQ ID NO: 6137 - DNA, 23 bp, Homo sapiens
ggagccccgcttcattgcagtgg

SEQ ID NO: 6138 - DNA, 23 bp, Homo sapiens
ggagccccgggcgccgtgggtgg

SEQ ID NO: 6139 - DNA, 23 bp, Homo sapiens
ggagcccctcaccctgagatggg

SEQ ID NO: 6140 - DNA, 23 bp, Homo sapiens
ggagcccttcagcagggtcaggg

SEQ ID NO: 6141 - DNA, 23 bp, Homo sapiens
ggagcccttcagccaggtcaggg

SEQ ID NO: 6142 - DNA, 23 bp, Homo sapiens
ggagcccttcagccgggtcaggg

SEQ ID NO: 6143 - DNA, 23 bp, Homo sapiens
ggagcccttcagctgggtcaggg

SEQ ID NO: 6144 - DNA, 23 bp, Homo sapiens
ggagccgcgggagccgtgggtgg

SEQ ID NO: 6145 - DNA, 23 bp, Homo sapiens
ggagccgcgggcgccgtgggtgg

SEQ ID NO: 6146 - DNA, 23 bp, Homo sapiens
ggagccggagtattgggacgagg

SEQ ID NO: 6147 - DNA, 23 bp, Homo sapiens
ggagccgtgggtggagcaggagg

SEQ ID NO: 6148 - DNA, 23 bp, Homo sapiens
ggagcgaggggaccgcaggcggg

SEQ ID NO: 6149 - DNA, 23 bp, Homo sapiens
ggagcgcagatcctcgttcaggg

SEQ ID NO: 6150 - DNA, 23 bp, Homo sapiens
ggagcgcaggtcctcattcaggg

SEQ ID NO: 6151 - DNA, 23 bp, Homo sapiens
ggagcgcaggtcctcgttcaggg

SEQ ID NO: 6152 - DNA, 23 bp, Homo sapiens
ggagcgcaggtcctcgttctggg

SEQ ID NO: 6153 - DNA, 23 bp, Homo sapiens
ggagctcaggtcctcgttcaggg

SEQ ID NO: 6154 - DNA, 23 bp, Homo sapiens
ggagctgaagtggtcgggggtgg

SEQ ID NO: 6155 - DNA, 23 bp, Homo sapiens
ggagctgaagtggtctggggtgg

SEQ ID NO: 6156 - DNA, 23 bp, Homo sapiens
ggaggaattgtgaggtgggtggg

SEQ ID NO: 6157 - DNA, 23 bp, Homo sapiens
ggaggaccagacccaggacacgg

SEQ ID NO: 6158 - DNA, 23 bp, Homo sapiens
ggaggaggaagagctcaggtggg

SEQ ID NO: 6159 - DNA, 23 bp, Homo sapiens
ggaggcgcccgtccggccccagg

SEQ ID NO: 6160 - DNA, 23 bp, Homo sapiens
ggaggcgcccgtcgggccccagg

SEQ ID NO: 6161 - DNA, 23 bp, Homo sapiens
ggaggcgcccgtggggccccagg

SEQ ID NO: 6162 - DNA, 23 bp, Homo sapiens
ggagggaaaccgcctctgcgggg

SEQ ID NO: 6163 - DNA, 23 bp, Homo sapiens
ggagggaaacggcctctgcgggg

SEQ ID NO: 6164 - DNA, 23 bp, Homo sapiens
ggagggaaacggcctctgtgggg

SEQ ID NO: 6165 - DNA, 23 bp, Homo sapiens
ggagggaaatggcctctgccggg

SEQ ID NO: 6166 - DNA, 23 bp, Homo sapiens
ggagggaaatggcctctgtgggg

SEQ ID NO: 6167 - DNA, 23 bp, Homo sapiens
ggagggagcacaggtcagcgtgg

SEQ ID NO: 6168 - DNA, 23 bp, Homo sapiens
ggagggcgatattctagtgttgg

SEQ ID NO: 6169 - DNA, 23 bp, Homo sapiens
ggagggtgatattctagtgttgg

SEQ ID NO: 6170 - DNA, 23 bp, Homo sapiens
ggaggtgtagaaatacctcatgg

SEQ ID NO: 6171 - DNA, 23 bp, Homo sapiens
ggaggtgtggaaatacctcatgg

SEQ ID NO: 6172 - DNA, 23 bp, Homo sapiens
ggagtaaggagggggatgagggg

SEQ ID NO: 6173 - DNA, 23 bp, Homo sapiens
ggagtcccgcggcttcggggtgg

SEQ ID NO: 6174 - DNA, 23 bp, Homo sapiens
ggagtcgctccgcagatacctgg

SEQ ID NO: 6175 - DNA, 23 bp, Homo sapiens
ggagtcgtgacctgcgccccagg

SEQ ID NO: 6176 - DNA, 23 bp, Homo sapiens
ggagtcgtgacctgcgccccggg

SEQ ID NO: 6177 - DNA, 23 bp, Homo sapiens
ggagtgagagcctggggacgagg

SEQ ID NO: 6178 - DNA, 23 bp, Homo sapiens
ggagtggagaatccccaacgcgg

SEQ ID NO: 6179 - DNA, 23 bp, Homo sapiens
ggagtggagaatcctcaacgcgg

SEQ ID NO: 6180 - DNA, 23 bp, Homo sapiens
ggagtggctccgcagacacctgg

SEQ ID NO: 6181 - DNA, 23 bp, Homo sapiens
ggagtggctccgcagatacctgg

SEQ ID NO: 6182 - DNA, 23 bp, Homo sapiens
ggagtggctccgcggatacctgg

SEQ ID NO: 6183 - DNA, 23 bp, Homo sapiens
ggagtgggagcctggggacgagg

SEQ ID NO: 6184 - DNA, 23 bp, Homo sapiens
ggagtgggagcctgggggagagg

SEQ ID NO: 6185 - DNA, 23 bp, Homo sapiens
ggagtgggagcctgggggccagg

SEQ ID NO: 6186 - DNA, 23 bp, Homo sapiens
ggagtgggagcctgggggcgagg

SEQ ID NO: 6187 - DNA, 23 bp, Homo sapiens
ggagtgggagcctgggggtgagg

SEQ ID NO: 6188 - DNA, 23 bp, Homo sapiens
ggataatcttctattccctgagg

SEQ ID NO: 6189 - DNA, 23 bp, Homo sapiens
ggatctcagacccggagactcgg

SEQ ID NO: 6190 - DNA, 23 bp, Homo sapiens
ggatctcagaccgggagactcgg

SEQ ID NO: 6191 - DNA, 23 bp, Homo sapiens
ggatctcagaccgggagacttgg

SEQ ID NO: 6192 - DNA, 23 bp, Homo sapiens
ggatctcagacggggagactcgg

SEQ ID NO: 6193 - DNA, 23 bp, Homo sapiens
ggatctcggacccggagactcgg

SEQ ID NO: 6194 - DNA, 23 bp, Homo sapiens
ggatgaagtccctgaggaaatgg

SEQ ID NO: 6195 - DNA, 23 bp, Homo sapiens
ggatgaagtccttgaggaaatgg

SEQ ID NO: 6196 - DNA, 23 bp, Homo sapiens
ggatgaagtctctgaggaaatgg

SEQ ID NO: 6197 - DNA, 23 bp, Homo sapiens
ggatgacgtctctgaggaaatgg

SEQ ID NO: 6198 - DNA, 23 bp, Homo sapiens
ggatgatccaagaaatcactggg

SEQ ID NO: 6199 - DNA, 23 bp, Homo sapiens
ggatggaaccttccagaagtggg

SEQ ID NO: 6200 - DNA, 23 bp, Homo sapiens
ggatggagccgcgggcaccgtgg

SEQ ID NO: 6201 - DNA, 23 bp, Homo sapiens
ggatggagccgcgggcgccgtgg

SEQ ID NO: 6202 - DNA, 23 bp, Homo sapiens
ggatggatgtatcaccttgatgg

SEQ ID NO: 6203 - DNA, 23 bp, Homo sapiens
ggatggcctcccacgagaagagg

SEQ ID NO: 6204 - DNA, 23 bp, Homo sapiens
ggatggcctcccacgaggagggg

SEQ ID NO: 6205 - DNA, 23 bp, Homo sapiens
ggatggccttccacgaggagggg

SEQ ID NO: 6206 - DNA, 23 bp, Homo sapiens
ggatggcgaggaccaaactcagg

SEQ ID NO: 6207 - DNA, 23 bp, Homo sapiens
ggatggcgccccgggcgccatgg

SEQ ID NO: 6208 - DNA, 23 bp, Homo sapiens
ggatgggaccttccagaagtggg

SEQ ID NO: 6209 - DNA, 23 bp, Homo sapiens
ggatggggaggaccaaactcagg

SEQ ID NO: 6210 - DNA, 23 bp, Homo sapiens
ggatggggaggaccagacccagg

SEQ ID NO: 6211 - DNA, 23 bp, Homo sapiens
ggatggtgcttccagtaacaagg

SEQ ID NO: 6212 - DNA, 23 bp, Homo sapiens
ggatggtgcttccagtaacgagg

SEQ ID NO: 6213 - DNA, 23 bp, Homo sapiens
ggatgtacggctgcgacctgggg

SEQ ID NO: 6214 - DNA, 23 bp, Homo sapiens
ggatgtacggctgcgacgtgggg

SEQ ID NO: 6215 - DNA, 23 bp, Homo sapiens
ggatgtatggctgcgacctgggg

SEQ ID NO: 6216 - DNA, 23 bp, Homo sapiens
ggatgtatggctgcgacgtgggg

SEQ ID NO: 6217 - DNA, 23 bp, Homo sapiens
ggatgtattgagcatgcaatggg

SEQ ID NO: 6218 - DNA, 23 bp, Homo sapiens
ggatgtattgagcatgcgatggg

SEQ ID NO: 6219 - DNA, 23 bp, Homo sapiens
ggatgtctggctgcgacctgggg

SEQ ID NO: 6220 - DNA, 23 bp, Homo sapiens
ggatgtctggctgcgacgtgggg

SEQ ID NO: 6221 - DNA, 23 bp, Homo sapiens
ggatgtgaagaaatacctcatgg

SEQ ID NO: 6222 - DNA, 23 bp, Homo sapiens
ggatgtgaagaaatacttcatgg

SEQ ID NO: 6223 - DNA, 23 bp, Homo sapiens
ggatgtggagaaatacctcatgg

SEQ ID NO: 6224 - DNA, 23 bp, Homo sapiens
ggatgtggtgaaatacctcatgg

SEQ ID NO: 6225 - DNA, 23 bp, Homo sapiens
ggatgtgtggctgcgacctgggg

SEQ ID NO: 6226 - DNA, 23 bp, Homo sapiens
ggatgtgtggctgcgacgtgggg

SEQ ID NO: 6227 - DNA, 23 bp, Homo sapiens
ggatgttacgcgtgtgtggtggg

SEQ ID NO: 6228 - DNA, 23 bp, Homo sapiens
ggatgtttcgcgtgtgtcgtggg

SEQ ID NO: 6229 - DNA, 23 bp, Homo sapiens
ggatgtttcgcgtgtgtgatggg

SEQ ID NO: 6230 - DNA, 23 bp, Homo sapiens
ggatgtttcgcgtgtgtggtggg

SEQ ID NO: 6231 - DNA, 23 bp, Homo sapiens
ggatgtttggctgcgacctgggg

SEQ ID NO: 6232 - DNA, 23 bp, Homo sapiens
ggatgtttggctgcgacgtgggg

SEQ ID NO: 6233 - DNA, 23 bp, Homo sapiens
ggattacatcgcccagaacgagg

SEQ ID NO: 6234 - DNA, 23 bp, Homo sapiens
ggattacatcgccctgaaagagg

SEQ ID NO: 6235 - DNA, 23 bp, Homo sapiens
ggattacatcgccctgaacgagg

SEQ ID NO: 6236 - DNA, 23 bp, Homo sapiens
ggattacatcgccctgaatgagg

SEQ ID NO: 6237 - DNA, 23 bp, Homo sapiens
ggattacatcgccttgaacgagg

SEQ ID NO: 6238 - DNA, 23 bp, Homo sapiens
ggattgggagcctggggacgagg

SEQ ID NO: 6239 - DNA, 23 bp, Homo sapiens
ggattggggagtcacagccttgg

SEQ ID NO: 6240 - DNA, 23 bp, Homo sapiens
ggattggggagtcccagccttgg

SEQ ID NO: 6241 - DNA, 23 bp, Homo sapiens
ggcacacagggtcccaggctggg

SEQ ID NO: 6242 - DNA, 23 bp, Homo sapiens
ggcaccgtggatagagcaggagg

SEQ ID NO: 6243 - DNA, 23 bp, Homo sapiens
ggcagagaacaaggcctgagagg

SEQ ID NO: 6244 - DNA, 23 bp, Homo sapiens
ggcagggaaatggcctctgtagg

SEQ ID NO: 6245 - DNA, 23 bp, Homo sapiens
ggcagggaaatggcctctgtggg

SEQ ID NO: 6246 - DNA, 23 bp, Homo sapiens
ggcagggaacacttctacctggg

SEQ ID NO: 6247 - DNA, 23 bp, Homo sapiens
ggcagggcacacttctacctggg

SEQ ID NO: 6248 - DNA, 23 bp, Homo sapiens
ggcagggccatgcaatcttaggg

SEQ ID NO: 6249 - DNA, 23 bp, Homo sapiens
ggcagggccatgcgatcttaggg

SEQ ID NO: 6250 - DNA, 23 bp, Homo sapiens
ggcagggccatgtgatcttaggg

SEQ ID NO: 6251 - DNA, 23 bp, Homo sapiens
ggcaggtctgggggtgggtgggg

SEQ ID NO: 6252 - DNA, 23 bp, Homo sapiens
ggcatggcctcccacgaggaggg

SEQ ID NO: 6253 - DNA, 23 bp, Homo sapiens
ggccaaaaatccccccaggttgg

SEQ ID NO: 6254 - DNA, 23 bp, Homo sapiens
ggccaaaaatccccccgggtggg

SEQ ID NO: 6255 - DNA, 23 bp, Homo sapiens
ggccaaaaatccccccgggttgg

SEQ ID NO: 6256 - DNA, 23 bp, Homo sapiens
ggccaaaaattcccccgggttgg

SEQ ID NO: 6257 - DNA, 23 bp, Homo sapiens
ggccaaaatccccgcgggttggg

SEQ ID NO: 6258 - DNA, 23 bp, Homo sapiens
ggccacctggcccgtccgtgggg

SEQ ID NO: 6259 - DNA, 23 bp, Homo sapiens
ggccagcccgggagacctacagg

SEQ ID NO: 6260 - DNA, 23 bp, Homo sapiens
ggccagcccgggagatctacagg

SEQ ID NO: 6261 - DNA, 23 bp, Homo sapiens
ggccagcccgggagatctatagg

SEQ ID NO: 6262 - DNA, 23 bp, Homo sapiens
ggccatccccggcgacctatagg

SEQ ID NO: 6263 - DNA, 23 bp, Homo sapiens
ggccatcccgggagatctacagg

SEQ ID NO: 6264 - DNA, 23 bp, Homo sapiens
ggccatcccgggagatctacggg

SEQ ID NO: 6265 - DNA, 23 bp, Homo sapiens
ggccatcccgggagatctatagg

SEQ ID NO: 6266 - DNA, 23 bp, Homo sapiens
ggccatgccgggagatctacggg

SEQ ID NO: 6267 - DNA, 23 bp, Homo sapiens
ggccccaggcgtggctctcaggg

SEQ ID NO: 6268 - DNA, 23 bp, Homo sapiens
ggccccgggcggggctctcaggg

SEQ ID NO: 6269 - DNA, 23 bp, Homo sapiens
ggcccctcctgctccacccacgg

SEQ ID NO: 6270 - DNA, 23 bp, Homo sapiens
ggcccctcctgctctatccacgg

SEQ ID NO: 6271 - DNA, 23 bp, Homo sapiens
ggcccctcctgctctatccatgg

SEQ ID NO: 6272 - DNA, 23 bp, Homo sapiens
ggcccctcttgctctatccacgg

SEQ ID NO: 6273 - DNA, 23 bp, Homo sapiens
ggcccctcttgctctatccatgg

SEQ ID NO: 6274 - DNA, 23 bp, Homo sapiens
ggcccgcccggcgagggcgcagg

SEQ ID NO: 6275 - DNA, 23 bp, Homo sapiens
ggcccgcccggcggggacgcagg

SEQ ID NO: 6276 - DNA, 23 bp, Homo sapiens
ggcccgcccggcgggggcgcagg

SEQ ID NO: 6277 - DNA, 23 bp, Homo sapiens
ggcccgcctggcgggggcgcagg

SEQ ID NO: 6278 - DNA, 23 bp, Homo sapiens
ggcccgtccgtaggggatgaggg

SEQ ID NO: 6279 - DNA, 23 bp, Homo sapiens
ggcccgtccgtgggggatgaggg

SEQ ID NO: 6280 - DNA, 23 bp, Homo sapiens
ggcccgtgacttttcctctcagg

SEQ ID NO: 6281 - DNA, 23 bp, Homo sapiens
ggccctcccggcgagggcgcagg

SEQ ID NO: 6282 - DNA, 23 bp, Homo sapiens
ggccctcctggcgggggcgcagg

SEQ ID NO: 6283 - DNA, 23 bp, Homo sapiens
ggccctgacccagaccagggcgg

SEQ ID NO: 6284 - DNA, 23 bp, Homo sapiens
ggccctgacccagacctgggcgg

SEQ ID NO: 6285 - DNA, 23 bp, Homo sapiens
ggccctgagcttctaccctgcgg

SEQ ID NO: 6286 - DNA, 23 bp, Homo sapiens
ggccctgggaaaggaggggaagg

SEQ ID NO: 6287 - DNA, 23 bp, Homo sapiens
ggccctgggcttctaccctacgg

SEQ ID NO: 6288 - DNA, 23 bp, Homo sapiens
ggccctgggcttctaccctgcgg

SEQ ID NO: 6289 - DNA, 23 bp, Homo sapiens
ggccctgggcttctaccctgggg

SEQ ID NO: 6290 - DNA, 23 bp, Homo sapiens
ggccctgggtttctaccctgcgg

SEQ ID NO: 6291 - DNA, 23 bp, Homo sapiens
ggccgcctccaacttgcgctggg

SEQ ID NO: 6292 - DNA, 23 bp, Homo sapiens
ggccgcctcccacttgagctggg

SEQ ID NO: 6293 - DNA, 23 bp, Homo sapiens
ggccgcctcccacttgcgctggg

SEQ ID NO: 6294 - DNA, 23 bp, Homo sapiens
ggccgcctcccacttgcgcttgg

SEQ ID NO: 6295 - DNA, 23 bp, Homo sapiens
ggccgcctcccacttgtgcttgg

SEQ ID NO: 6296 - DNA, 23 bp, Homo sapiens
ggccggtgagtgaccccgcccgg

SEQ ID NO: 6297 - DNA, 23 bp, Homo sapiens
ggccggtgagtgaccccggccgg

SEQ ID NO: 6298 - DNA, 23 bp, Homo sapiens
ggccgtctcccacttgcgctggg

SEQ ID NO: 6299 - DNA, 23 bp, Homo sapiens
ggccgtctcccacttgtgcttgg

SEQ ID NO: 6300 - DNA, 23 bp, Homo sapiens
ggcctcagggaggcggatctcgg

SEQ ID NO: 6301 - DNA, 23 bp, Homo sapiens
ggcctcaggggggcggatctcgg

SEQ ID NO: 6302 - DNA, 23 bp, Homo sapiens
ggcctcaggggggtggatctcgg

SEQ ID NO: 6303 - DNA, 23 bp, Homo sapiens
ggcctcagggggtcggatctcgg

SEQ ID NO: 6304 - DNA, 23 bp, Homo sapiens
ggcctcccgagagcagcaggagg

SEQ ID NO: 6305 - DNA, 23 bp, Homo sapiens
ggcctctcctgctctatccacgg

SEQ ID NO: 6306 - DNA, 23 bp, Homo sapiens
ggcctctgccgggaggagcgagg

SEQ ID NO: 6307 - DNA, 23 bp, Homo sapiens
ggcctctgcggagaggaacgagg

SEQ ID NO: 6308 - DNA, 23 bp, Homo sapiens
ggcctctgcggagaggagcgagg

SEQ ID NO: 6309 - DNA, 23 bp, Homo sapiens
ggcctctgcggggagaagcaagg

SEQ ID NO: 6310 - DNA, 23 bp, Homo sapiens
ggcctctggggagaggagcgagg

SEQ ID NO: 6311 - DNA, 23 bp, Homo sapiens
ggcctctgtagggaggagcaagg

SEQ ID NO: 6312 - DNA, 23 bp, Homo sapiens
ggcctctgtggggagaagcaagg

SEQ ID NO: 6313 - DNA, 23 bp, Homo sapiens
ggcctctgtggggaggagagagg

SEQ ID NO: 6314 - DNA, 23 bp, Homo sapiens
ggcctctgtggggaggagcgagg

SEQ ID NO: 6315 - DNA, 23 bp, Homo sapiens
ggcctgagaggaaaagtcacggg

SEQ ID NO: 6316 - DNA, 23 bp, Homo sapiens
ggcgacccggcccgtccgtgggg

SEQ ID NO: 6317 - DNA, 23 bp, Homo sapiens
ggcgacccgggccgtacgtgggg

SEQ ID NO: 6318 - DNA, 23 bp, Homo sapiens
ggcgacccgggccgtccgtgggg

SEQ ID NO: 6319 - DNA, 23 bp, Homo sapiens
ggcgacctggcccgtccgtaggg

SEQ ID NO: 6320 - DNA, 23 bp, Homo sapiens
ggcgacctggcccgtccgtgggg

SEQ ID NO: 6321 - DNA, 23 bp, Homo sapiens
ggcgccatgacggccatcctcgg

SEQ ID NO: 6322 - DNA, 23 bp, Homo sapiens
ggcgccatggatagagcaagagg

SEQ ID NO: 6323 - DNA, 23 bp, Homo sapiens
ggcgccatggatagagcaggagg

SEQ ID NO: 6324 - DNA, 23 bp, Homo sapiens
ggcgcccgcggctcccctctcgg

SEQ ID NO: 6325 - DNA, 23 bp, Homo sapiens
ggcgcccgcggctcccctcttgg

SEQ ID NO: 6326 - DNA, 23 bp, Homo sapiens
ggcgcccgcggctcctctctcgg

SEQ ID NO: 6327 - DNA, 23 bp, Homo sapiens
ggcgcccgcggctccttcctcgg

SEQ ID NO: 6328 - DNA, 23 bp, Homo sapiens
ggcgcccggggcgccatcctcgg

SEQ ID NO: 6329 - DNA, 23 bp, Homo sapiens
ggcgcccggggctcccctctcgg

SEQ ID NO: 6330 - DNA, 23 bp, Homo sapiens
ggcgcccggggctccgtcctcgg

SEQ ID NO: 6331 - DNA, 23 bp, Homo sapiens
ggcgccgtggatagagcaagagg

SEQ ID NO: 6332 - DNA, 23 bp, Homo sapiens
ggcgccgtggatagagcaggagg

SEQ ID NO: 6333 - DNA, 23 bp, Homo sapiens
ggcgccgtgggtggagcaggagg

SEQ ID NO: 6334 - DNA, 23 bp, Homo sapiens
ggcggcatgacggccatcctcgg

SEQ ID NO: 6335 - DNA, 23 bp, Homo sapiens
ggcggcccgtgcggcggagcagg

SEQ ID NO: 6336 - DNA, 23 bp, Homo sapiens
ggcggcccgtgtggcggagcagg

SEQ ID NO: 6337 - DNA, 23 bp, Homo sapiens
ggcggggcacacttctacctggg

SEQ ID NO: 6338 - DNA, 23 bp, Homo sapiens
ggcggggcggggcggggctcggg

SEQ ID NO: 6339 - DNA, 23 bp, Homo sapiens
ggcggggctctcagggtctcagg

SEQ ID NO: 6340 - DNA, 23 bp, Homo sapiens
ggcggggttctcagggtctcagg

SEQ ID NO: 6341 - DNA, 23 bp, Homo sapiens
ggcgggtcccgcggcctcagggg

SEQ ID NO: 6342 - DNA, 23 bp, Homo sapiens
ggcgggtcccgcggcctcggggg

SEQ ID NO: 6343 - DNA, 23 bp, Homo sapiens
ggcgggtctggggcggggtgggg

SEQ ID NO: 6344 - DNA, 23 bp, Homo sapiens
ggcgggtctgggggtgggtgggg

SEQ ID NO: 6345 - DNA, 23 bp, Homo sapiens
ggcgggtgagtgcggggtcgtgg

SEQ ID NO: 6346 - DNA, 23 bp, Homo sapiens
ggcggtgtagaaatacctcatgg

SEQ ID NO: 6347 - DNA, 23 bp, Homo sapiens
ggcggtgtcgaaatacctcatgg

SEQ ID NO: 6348 - DNA, 23 bp, Homo sapiens
ggcggtgtggaaatacctcatgg

SEQ ID NO: 6349 - DNA, 23 bp, Homo sapiens
ggcgtggctctcagagtctcagg

SEQ ID NO: 6350 - DNA, 23 bp, Homo sapiens
ggcgtggctctcagggtctcagg

SEQ ID NO: 6351 - DNA, 23 bp, Homo sapiens
ggctcccgcggctcccctcttgg

SEQ ID NO: 6352 - DNA, 23 bp, Homo sapiens
ggctcctcctgctctatccacgg

SEQ ID NO: 6353 - DNA, 23 bp, Homo sapiens
ggctctgggaaaagaggagaagg

SEQ ID NO: 6354 - DNA, 23 bp, Homo sapiens
ggctctgggaaaagaggggaagg

SEQ ID NO: 6355 - DNA, 23 bp, Homo sapiens
ggctctgggaaaggaggagaagg

SEQ ID NO: 6356 - DNA, 23 bp, Homo sapiens
ggctctgggaaaggaggggaagg

SEQ ID NO: 6357 - DNA, 23 bp, Homo sapiens
ggctgatgcctgaggtccttggg

SEQ ID NO: 6358 - DNA, 23 bp, Homo sapiens
ggctgccacgtggggtcggacgg

SEQ ID NO: 6359 - DNA, 23 bp, Homo sapiens
ggctgcgacctggggccccacgg

SEQ ID NO: 6360 - DNA, 23 bp, Homo sapiens
ggctgcgacctggggcccgacgg

SEQ ID NO: 6361 - DNA, 23 bp, Homo sapiens
ggctgcgacctggggccggacgg

SEQ ID NO: 6362 - DNA, 23 bp, Homo sapiens
ggctgcgacgtggggcccgacgg

SEQ ID NO: 6363 - DNA, 23 bp, Homo sapiens
ggctgcgacgtggggccggacgg

SEQ ID NO: 6364 - DNA, 23 bp, Homo sapiens
ggctgcgacgtggggtcggacgg

SEQ ID NO: 6365 - DNA, 23 bp, Homo sapiens
ggctgctgcaggggtcaaagagg

SEQ ID NO: 6366 - DNA, 23 bp, Homo sapiens
ggctgctgcaggggtcaaagggg

SEQ ID NO: 6367 - DNA, 23 bp, Homo sapiens
ggctggagtagaacaaaaacagg

SEQ ID NO: 6368 - DNA, 23 bp, Homo sapiens
ggctggcctcccacaaggagggg

SEQ ID NO: 6369 - DNA, 23 bp, Homo sapiens
gggaaaagaggagaaggtgaggg

SEQ ID NO: 6370 - DNA, 23 bp, Homo sapiens
gggaaaagaggggaaggtgaggg

SEQ ID NO: 6371 - DNA, 23 bp, Homo sapiens
gggaaaaggcctaggtaatgggg

SEQ ID NO: 6372 - DNA, 23 bp, Homo sapiens
gggaaaaggcctgggtaatgggg

SEQ ID NO: 6373 - DNA, 23 bp, Homo sapiens
gggaaacggcctctgcggagagg

SEQ ID NO: 6374 - DNA, 23 bp, Homo sapiens
gggaaacggcctctggggagagg

SEQ ID NO: 6375 - DNA, 23 bp, Homo sapiens
gggaaagcagctgtgggttctgg

SEQ ID NO: 6376 - DNA, 23 bp, Homo sapiens
gggaaagcagttgtgggttctgg

SEQ ID NO: 6377 - DNA, 23 bp, Homo sapiens
gggaaaggaagggaagatgaggg

SEQ ID NO: 6378 - DNA, 23 bp, Homo sapiens
gggaaaggaggagaaggtgaggg

SEQ ID NO: 6379 - DNA, 23 bp, Homo sapiens
gggaaaggaggggaagacgaggg

SEQ ID NO: 6380 - DNA, 23 bp, Homo sapiens
gggaaaggaggggaagatgaggg

SEQ ID NO: 6381 - DNA, 23 bp, Homo sapiens
gggaaaggaggggaaggtgaggg

SEQ ID NO: 6382 - DNA, 23 bp, Homo sapiens
gggaaatggcctctgccgggagg

SEQ ID NO: 6383 - DNA, 23 bp, Homo sapiens
gggaaatggcctctgtagggagg

SEQ ID NO: 6384 - DNA, 23 bp, Homo sapiens
gggaaatggcctctgtggggagg

SEQ ID NO: 6385 - DNA, 23 bp, Homo sapiens
gggaagaaaatgccctatgaggg

SEQ ID NO: 6386 - DNA, 23 bp, Homo sapiens
gggaagaaaatgccctgtgaggg

SEQ ID NO: 6387 - DNA, 23 bp, Homo sapiens
gggaagaaaatgtcctgtgaggg

SEQ ID NO: 6388 - DNA, 23 bp, Homo sapiens
gggaagcagcatccacacagggg

SEQ ID NO: 6389 - DNA, 23 bp, Homo sapiens
gggaagcagcatcctcacagggg

SEQ ID NO: 6390 - DNA, 23 bp, Homo sapiens
gggaagcagcatgcacacagggg

SEQ ID NO: 6391 - DNA, 23 bp, Homo sapiens
gggaagccgcgccgggaggaggg

SEQ ID NO: 6392 - DNA, 23 bp, Homo sapiens
gggaagccgcgcctggaggaggg

SEQ ID NO: 6393 - DNA, 23 bp, Homo sapiens
gggaagcggcctctgcggagagg

SEQ ID NO: 6394 - DNA, 23 bp, Homo sapiens
gggaatcggcctctgcggagagg

SEQ ID NO: 6395 - DNA, 23 bp, Homo sapiens
gggacacctggggtggggaaggg

SEQ ID NO: 6396 - DNA, 23 bp, Homo sapiens
gggaccacggcgacgctgattgg

SEQ ID NO: 6397 - DNA, 23 bp, Homo sapiens
gggaccccggcgacactgattgg

SEQ ID NO: 6398 - DNA, 23 bp, Homo sapiens
gggaccccggcgacgctgattgg

SEQ ID NO: 6399 - DNA, 23 bp, Homo sapiens
gggaccgcaggcgggggcgcagg

SEQ ID NO: 6400 - DNA, 23 bp, Homo sapiens
gggaccgcaggcgggggctcagg

SEQ ID NO: 6401 - DNA, 23 bp, Homo sapiens
gggaccgcggcgacgctgattgg

SEQ ID NO: 6402 - DNA, 23 bp, Homo sapiens
gggacctgcgccccgggccgggg

SEQ ID NO: 6403 - DNA, 23 bp, Homo sapiens
gggacgcgtcacgagtatcctgg

SEQ ID NO: 6404 - DNA, 23 bp, Homo sapiens
gggacgcgtcatgagtattcagg

SEQ ID NO: 6405 - DNA, 23 bp, Homo sapiens
gggacggtggactgggaagacgg

SEQ ID NO: 6406 - DNA, 23 bp, Homo sapiens
gggacggtggactgggaagatgg

SEQ ID NO: 6407 - DNA, 23 bp, Homo sapiens
gggacggtggattgggaagatgg

SEQ ID NO: 6408 - DNA, 23 bp, Homo sapiens
gggacggtgggctgggaagatgg

SEQ ID NO: 6409 - DNA, 23 bp, Homo sapiens
gggacgtttcgagtgtgtggtgg

SEQ ID NO: 6410 - DNA, 23 bp, Homo sapiens
gggactgcggagacgctgattgg

SEQ ID NO: 6411 - DNA, 23 bp, Homo sapiens
gggactgcgtagacgctgattgg

SEQ ID NO: 6412 - DNA, 23 bp, Homo sapiens
gggactggggcggggctcggggg

SEQ ID NO: 6413 - DNA, 23 bp, Homo sapiens
gggagaagaagtgaaactcaggg

SEQ ID NO: 6414 - DNA, 23 bp, Homo sapiens
gggagaagaagtgaaactcgtgg

SEQ ID NO: 6415 - DNA, 23 bp, Homo sapiens
gggagaatccgagtccgggtggg

SEQ ID NO: 6416 - DNA, 23 bp, Homo sapiens
gggagaatctgagtcccggtggg

SEQ ID NO: 6417 - DNA, 23 bp, Homo sapiens
gggagaatctgagtccgggtggg

SEQ ID NO: 6418 - DNA, 23 bp, Homo sapiens
gggagaatgtgagtccgggtggg

SEQ ID NO: 6419 - DNA, 23 bp, Homo sapiens
gggagatctacaggcgatcaggg

SEQ ID NO: 6420 - DNA, 23 bp, Homo sapiens
gggagatctataggcgatcaggg

SEQ ID NO: 6421 - DNA, 23 bp, Homo sapiens
gggagcctggggacgaggagtgg

SEQ ID NO: 6422 - DNA, 23 bp, Homo sapiens
gggagcctgggggagaggagggg

SEQ ID NO: 6423 - DNA, 23 bp, Homo sapiens
gggagcctgggggccaggagggg

SEQ ID NO: 6424 - DNA, 23 bp, Homo sapiens
gggagcctgggggcgagcagtgg

SEQ ID NO: 6425 - DNA, 23 bp, Homo sapiens
gggagcctgggggcgaggagggg

SEQ ID NO: 6426 - DNA, 23 bp, Homo sapiens
gggagcctgggggcgaggagtgg

SEQ ID NO: 6427 - DNA, 23 bp, Homo sapiens
gggagcctgggggtgaggagggg

SEQ ID NO: 6428 - DNA, 23 bp, Homo sapiens
gggaggagagaggggaccgcagg

SEQ ID NO: 6429 - DNA, 23 bp, Homo sapiens
gggaggagcaaggggaccgcagg

SEQ ID NO: 6430 - DNA, 23 bp, Homo sapiens
gggaggagcgaggggaccgcagg

SEQ ID NO: 6431 - DNA, 23 bp, Homo sapiens
gggaggcgccccgtggcccccgg

SEQ ID NO: 6432 - DNA, 23 bp, Homo sapiens
gggaggcgccccgtggcccctgg

SEQ ID NO: 6433 - DNA, 23 bp, Homo sapiens
gggagggaaaccgcctctgcggg

SEQ ID NO: 6434 - DNA, 23 bp, Homo sapiens
gggagggaaacggcctctgcggg

SEQ ID NO: 6435 - DNA, 23 bp, Homo sapiens
gggagggaaacggcctctgtggg

SEQ ID NO: 6436 - DNA, 23 bp, Homo sapiens
gggagggaaatggcctctgccgg

SEQ ID NO: 6437 - DNA, 23 bp, Homo sapiens
gggagggaaatggcctctgtggg

SEQ ID NO: 6438 - DNA, 23 bp, Homo sapiens
gggagtcgtgacctgcgccccgg

SEQ ID NO: 6439 - DNA, 23 bp, Homo sapiens
gggatgcagcatccacacagggg

SEQ ID NO: 6440 - DNA, 23 bp, Homo sapiens
gggatgcgtcacgagtatcctgg

SEQ ID NO: 6441 - DNA, 23 bp, Homo sapiens
gggatggaaccttccagaagtgg

SEQ ID NO: 6442 - DNA, 23 bp, Homo sapiens
gggatggcctcccacgaggaggg

SEQ ID NO: 6443 - DNA, 23 bp, Homo sapiens
gggatggccttccacgaggaggg

SEQ ID NO: 6444 - DNA, 23 bp, Homo sapiens
gggatgggaccttccagaagtgg

SEQ ID NO: 6445 - DNA, 23 bp, Homo sapiens
gggatggtaggctgggaagatgg

SEQ ID NO: 6446 - DNA, 23 bp, Homo sapiens
gggatggtggactgggaagacgg

SEQ ID NO: 6447 - DNA, 23 bp, Homo sapiens
gggatggtggactgggaagatgg

SEQ ID NO: 6448 - DNA, 23 bp, Homo sapiens
gggatggtgggctgggaagacgg

SEQ ID NO: 6449 - DNA, 23 bp, Homo sapiens
gggatggtgggctgggaagatgg

SEQ ID NO: 6450 - DNA, 23 bp, Homo sapiens
gggatgttacgcgtgtgtggtgg

SEQ ID NO: 6451 - DNA, 23 bp, Homo sapiens
gggatgtttcgcgtgtgtcgtgg

SEQ ID NO: 6452 - DNA, 23 bp, Homo sapiens
gggatgtttcgcgtgtgtgatgg

SEQ ID NO: 6453 - DNA, 23 bp, Homo sapiens
gggatgtttcgcgtgtgtggtgg

SEQ ID NO: 6454 - DNA, 23 bp, Homo sapiens
gggcaggatcaggaaacacaggg

SEQ ID NO: 6455 - DNA, 23 bp, Homo sapiens
gggcaggatcaggaaacacgagg

SEQ ID NO: 6456 - DNA, 23 bp, Homo sapiens
gggcaggatcaggaaacacgggg

SEQ ID NO: 6457 - DNA, 23 bp, Homo sapiens
gggcaggatcaggaaacatgggg

SEQ ID NO: 6458 - DNA, 23 bp, Homo sapiens
gggcaggtgagtgcggggtcggg

SEQ ID NO: 6459 - DNA, 23 bp, Homo sapiens
gggcattttcttcccacaggtgg

SEQ ID NO: 6460 - DNA, 23 bp, Homo sapiens
gggccacctggcccgtccgtggg

SEQ ID NO: 6461 - DNA, 23 bp, Homo sapiens
gggccccaggcgtggctctcagg

SEQ ID NO: 6462 - DNA, 23 bp, Homo sapiens
gggcccccaagagtagcaggagg

SEQ ID NO: 6463 - DNA, 23 bp, Homo sapiens
gggccccccagagcagcaggagg

SEQ ID NO: 6464 - DNA, 23 bp, Homo sapiens
gggcccccgagagtagcaggagg

SEQ ID NO: 6465 - DNA, 23 bp, Homo sapiens
gggccctgggcttctaccctggg

SEQ ID NO: 6466 - DNA, 23 bp, Homo sapiens
gggccgccgagagcagcaggagg

SEQ ID NO: 6467 - DNA, 23 bp, Homo sapiens
gggccgcctccaacttgcgctgg

SEQ ID NO: 6468 - DNA, 23 bp, Homo sapiens
gggccgcctcccacttgagctgg

SEQ ID NO: 6469 - DNA, 23 bp, Homo sapiens
gggccgcctcccacttgcgctgg

SEQ ID NO: 6470 - DNA, 23 bp, Homo sapiens
gggccgcgtctgcaatggggagg

SEQ ID NO: 6471 - DNA, 23 bp, Homo sapiens
gggccgcgtctgcattggggagg

SEQ ID NO: 6472 - DNA, 23 bp, Homo sapiens
gggccggtgagtgcgggatcggg

SEQ ID NO: 6473 - DNA, 23 bp, Homo sapiens
gggccggtgagtgcggggtcggg

SEQ ID NO: 6474 - DNA, 23 bp, Homo sapiens
gggccggtgagtgcggggttggg

SEQ ID NO: 6475 - DNA, 23 bp, Homo sapiens
gggccgtctcccacttgcgctgg

SEQ ID NO: 6476 - DNA, 23 bp, Homo sapiens
gggccgtgtctgcactggggagg

SEQ ID NO: 6477 - DNA, 23 bp, Homo sapiens
gggccgtgtctgcattggggagg

SEQ ID NO: 6478 - DNA, 23 bp, Homo sapiens
gggcctgtgagtgcgaggttggg

SEQ ID NO: 6479 - DNA, 23 bp, Homo sapiens
gggcctgtgagtgcggggttagg

SEQ ID NO: 6480 - DNA, 23 bp, Homo sapiens
gggcctgtgagtgcggggttggg

SEQ ID NO: 6481 - DNA, 23 bp, Homo sapiens
gggcgaagtaccagggccccagg

SEQ ID NO: 6482 - DNA, 23 bp, Homo sapiens
gggcgaagtcccagggccccagg

SEQ ID NO: 6483 - DNA, 23 bp, Homo sapiens
gggcgacccggcccgtccgtggg

SEQ ID NO: 6484 - DNA, 23 bp, Homo sapiens
gggcgacccgggccgtacgtggg

SEQ ID NO: 6485 - DNA, 23 bp, Homo sapiens
gggcgacccgggccgtccgtggg

SEQ ID NO: 6486 - DNA, 23 bp, Homo sapiens
gggcgacctggcccgtccgtagg

SEQ ID NO: 6487 - DNA, 23 bp, Homo sapiens
gggcgacctggcccgtccgtggg

SEQ ID NO: 6488 - DNA, 23 bp, Homo sapiens
gggcgccatcctcggactcgcgg

SEQ ID NO: 6489 - DNA, 23 bp, Homo sapiens
gggcgccatcctcggactcgtgg

SEQ ID NO: 6490 - DNA, 23 bp, Homo sapiens
gggcgccatgaccagcatctcgg

SEQ ID NO: 6491 - DNA, 23 bp, Homo sapiens
gggcgccatgaccagcatcttgg

SEQ ID NO: 6492 - DNA, 23 bp, Homo sapiens
gggcgccatgacccgcatctcgg

SEQ ID NO: 6493 - DNA, 23 bp, Homo sapiens
gggcgccgtgacccgcatctcgg

SEQ ID NO: 6494 - DNA, 23 bp, Homo sapiens
gggcggattccgcagcctcgggg

SEQ ID NO: 6495 - DNA, 23 bp, Homo sapiens
gggcggggcggggcggggctcgg

SEQ ID NO: 6496 - DNA, 23 bp, Homo sapiens
gggcggggctcggggggacgggg

SEQ ID NO: 6497 - DNA, 23 bp, Homo sapiens
gggcggggctcggggggactggg

SEQ ID NO: 6498 - DNA, 23 bp, Homo sapiens
gggcggggggggcggggaggggg

SEQ ID NO: 6499 - DNA, 23 bp, Homo sapiens
gggcgggggggggtggggtgggg

SEQ ID NO: 6500 - DNA, 23 bp, Homo sapiens
gggcgggtcccgcggcctcaggg

SEQ ID NO: 6501 - DNA, 23 bp, Homo sapiens
gggcgggtcccgcggcctcgggg

SEQ ID NO: 6502 - DNA, 23 bp, Homo sapiens
gggcgggtgagtgcggggtcggg

SEQ ID NO: 6503 - DNA, 23 bp, Homo sapiens
gggcgggttccgcagcctcgggg

SEQ ID NO: 6504 - DNA, 23 bp, Homo sapiens
gggctccccgcggccaggccggg

SEQ ID NO: 6505 - DNA, 23 bp, Homo sapiens
gggctccccgcggccgggccagg

SEQ ID NO: 6506 - DNA, 23 bp, Homo sapiens
gggctccccgcggccgggccggg

SEQ ID NO: 6507 - DNA, 23 bp, Homo sapiens
gggctcccctctcggactcgcgg

SEQ ID NO: 6508 - DNA, 23 bp, Homo sapiens
gggctcccgagagcagcaggagg

SEQ ID NO: 6509 - DNA, 23 bp, Homo sapiens
gggctccgtcctcggactcgcgg

SEQ ID NO: 6510 - DNA, 23 bp, Homo sapiens
gggctctccactgccgggccggg

SEQ ID NO: 6511 - DNA, 23 bp, Homo sapiens
gggctctccgcggccaggccggg

SEQ ID NO: 6512 - DNA, 23 bp, Homo sapiens
gggctctccgcggccgggccggg

SEQ ID NO: 6513 - DNA, 23 bp, Homo sapiens
gggctctccgcggctgggccggg

SEQ ID NO: 6514 - DNA, 23 bp, Homo sapiens
gggctgaggcttggaggtcaggg

SEQ ID NO: 6515 - DNA, 23 bp, Homo sapiens
gggctgaggcttgggggtcaggg

SEQ ID NO: 6516 - DNA, 23 bp, Homo sapiens
gggctgaggcttgggtgtaaggg

SEQ ID NO: 6517 - DNA, 23 bp, Homo sapiens
gggctggcctcccacaaggaggg

SEQ ID NO: 6518 - DNA, 23 bp, Homo sapiens
gggctggtgagtgcggggtcggg

SEQ ID NO: 6519 - DNA, 23 bp, Homo sapiens
gggcttcccgcggccgggccggg

SEQ ID NO: 6520 - DNA, 23 bp, Homo sapiens
ggggaaaggcctgggtaatgggg

SEQ ID NO: 6521 - DNA, 23 bp, Homo sapiens
ggggaccgggctgaccacggggg

SEQ ID NO: 6522 - DNA, 23 bp, Homo sapiens
ggggacggggctgaccacggggg

SEQ ID NO: 6523 - DNA, 23 bp, Homo sapiens
ggggacggggctgaccgcggggg

SEQ ID NO: 6524 - DNA, 23 bp, Homo sapiens
ggggactgggctgaccgcggggg

SEQ ID NO: 6525 - DNA, 23 bp, Homo sapiens
ggggagaatccgagtccgggtgg

SEQ ID NO: 6526 - DNA, 23 bp, Homo sapiens
ggggagaatctgagtcccggtgg

SEQ ID NO: 6527 - DNA, 23 bp, Homo sapiens
ggggagaatctgagtccgggtgg

SEQ ID NO: 6528 - DNA, 23 bp, Homo sapiens
ggggagaatgtgagtccgggtgg

SEQ ID NO: 6529 - DNA, 23 bp, Homo sapiens
ggggagactcggggcgacccggg

SEQ ID NO: 6530 - DNA, 23 bp, Homo sapiens
ggggagactctaggcgacccggg

SEQ ID NO: 6531 - DNA, 23 bp, Homo sapiens
ggggagactctgggcgacccggg

SEQ ID NO: 6532 - DNA, 23 bp, Homo sapiens
ggggagccgcgcagggaggaggg

SEQ ID NO: 6533 - DNA, 23 bp, Homo sapiens
ggggagccgcgcagggaggtggg

SEQ ID NO: 6534 - DNA, 23 bp, Homo sapiens
ggggagccgcgccgggacgaggg

SEQ ID NO: 6535 - DNA, 23 bp, Homo sapiens
ggggagccgcgccgggaggaggg

SEQ ID NO: 6536 - DNA, 23 bp, Homo sapiens
ggggagggggcagaggggaaagg

SEQ ID NO: 6537 - DNA, 23 bp, Homo sapiens
ggggcagagggaaaaggcctagg

SEQ ID NO: 6538 - DNA, 23 bp, Homo sapiens
ggggcagagggaaaaggcctggg

SEQ ID NO: 6539 - DNA, 23 bp, Homo sapiens
ggggcagaggggaaaggcctggg

SEQ ID NO: 6540 - DNA, 23 bp, Homo sapiens
ggggcagtggggaaaggcctggg

SEQ ID NO: 6541 - DNA, 23 bp, Homo sapiens
ggggccctcagaagaaactcagg

SEQ ID NO: 6542 - DNA, 23 bp, Homo sapiens
ggggccctcagaggaaactcagg

SEQ ID NO: 6543 - DNA, 23 bp, Homo sapiens
ggggccctcagaggaaactcggg

SEQ ID NO: 6544 - DNA, 23 bp, Homo sapiens
ggggccctgaccctgctgaaggg

SEQ ID NO: 6545 - DNA, 23 bp, Homo sapiens
ggggccggagtattgggaccagg

SEQ ID NO: 6546 - DNA, 23 bp, Homo sapiens
ggggccggagtattgggacgagg

SEQ ID NO: 6547 - DNA, 23 bp, Homo sapiens
ggggccggagtattgggacgggg

SEQ ID NO: 6548 - DNA, 23 bp, Homo sapiens
ggggcgacccgggccgtacgtgg

SEQ ID NO: 6549 - DNA, 23 bp, Homo sapiens
ggggcgacccgggccgtccgtgg

SEQ ID NO: 6550 - DNA, 23 bp, Homo sapiens
ggggcggggagggggcagagggg

SEQ ID NO: 6551 - DNA, 23 bp, Homo sapiens
ggggcggggcggggctcgggggg

SEQ ID NO: 6552 - DNA, 23 bp, Homo sapiens
ggggcggggctcgcgggacgggg

SEQ ID NO: 6553 - DNA, 23 bp, Homo sapiens
ggggcggggctcgggggaccggg

SEQ ID NO: 6554 - DNA, 23 bp, Homo sapiens
ggggcggggctcgggggacgggg

SEQ ID NO: 6555 - DNA, 23 bp, Homo sapiens
ggggcggggctcgggggactggg

SEQ ID NO: 6556 - DNA, 23 bp, Homo sapiens
ggggcggggctcggggggacggg

SEQ ID NO: 6557 - DNA, 23 bp, Homo sapiens
ggggcggggctcggggggactgg

SEQ ID NO: 6558 - DNA, 23 bp, Homo sapiens
ggggctccccgcggccaggccgg

SEQ ID NO: 6559 - DNA, 23 bp, Homo sapiens
ggggctccccgcggccgggccgg

SEQ ID NO: 6560 - DNA, 23 bp, Homo sapiens
ggggctctccactgccgggccgg

SEQ ID NO: 6561 - DNA, 23 bp, Homo sapiens
ggggctctccgcggccaggccgg

SEQ ID NO: 6562 - DNA, 23 bp, Homo sapiens
ggggctctccgcggccgggccgg

SEQ ID NO: 6563 - DNA, 23 bp, Homo sapiens
ggggctctccgcggctgggccgg

SEQ ID NO: 6564 - DNA, 23 bp, Homo sapiens
ggggctggggcggggctcgcggg

SEQ ID NO: 6565 - DNA, 23 bp, Homo sapiens
ggggctggggcggggctcggggg

SEQ ID NO: 6566 - DNA, 23 bp, Homo sapiens
ggggcttcccgcggccgggccgg

SEQ ID NO: 6567 - DNA, 23 bp, Homo sapiens
gggggaccgggctgaccacgggg

SEQ ID NO: 6568 - DNA, 23 bp, Homo sapiens
gggggaccgggctgaccgcgggg

SEQ ID NO: 6569 - DNA, 23 bp, Homo sapiens
gggggaccgggctgacctcgggg

SEQ ID NO: 6570 - DNA, 23 bp, Homo sapiens
gggggacgggctgaccacggggg

SEQ ID NO: 6571 - DNA, 23 bp, Homo sapiens
gggggacggggctgaccacgggg

SEQ ID NO: 6572 - DNA, 23 bp, Homo sapiens
gggggacggggctgaccgcgggg

SEQ ID NO: 6573 - DNA, 23 bp, Homo sapiens
gggggacggtgctgaccgcgggg

SEQ ID NO: 6574 - DNA, 23 bp, Homo sapiens
gggggactgggctgaccgcgggg

SEQ ID NO: 6575 - DNA, 23 bp, Homo sapiens
gggggactgggctgaccgtgggg

SEQ ID NO: 6576 - DNA, 23 bp, Homo sapiens
gggggagccgcgccgggacgagg

SEQ ID NO: 6577 - DNA, 23 bp, Homo sapiens
gggggagccgcgccgggaggagg

SEQ ID NO: 6578 - DNA, 23 bp, Homo sapiens
gggggcagaggggaaaggcctgg

SEQ ID NO: 6579 - DNA, 23 bp, Homo sapiens
gggggccctcagaggaaactcgg

SEQ ID NO: 6580 - DNA, 23 bp, Homo sapiens
gggggcggggagggggcagaggg

SEQ ID NO: 6581 - DNA, 23 bp, Homo sapiens
ggggggacggggctgaccgcggg

SEQ ID NO: 6582 - DNA, 23 bp, Homo sapiens
ggggggactgggctgaccgcggg

SEQ ID NO: 6583 - DNA, 23 bp, Homo sapiens
ggggggcggggagggggcagagg

SEQ ID NO: 6584 - DNA, 23 bp, Homo sapiens
gggggggggtggggtggggaggg

SEQ ID NO: 6585 - DNA, 23 bp, Homo sapiens
ggggggggtggggtggggagggg

SEQ ID NO: 6586 - DNA, 23 bp, Homo sapiens
ggggggggtggtggggcagaggg

SEQ ID NO: 6587 - DNA, 23 bp, Homo sapiens
gggggggtggggtggggaggggg

SEQ ID NO: 6588 - DNA, 23 bp, Homo sapiens
gggggggtggtggggcagagggg

SEQ ID NO: 6589 - DNA, 23 bp, Homo sapiens
gggggtggcgggtctggggcggg

SEQ ID NO: 6590 - DNA, 23 bp, Homo sapiens
gggggtggggcagagggaaaagg

SEQ ID NO: 6591 - DNA, 23 bp, Homo sapiens
ggggtaaggaggggaatgggggg

SEQ ID NO: 6592 - DNA, 23 bp, Homo sapiens
ggggtaaggagggggatgagggg

SEQ ID NO: 6593 - DNA, 23 bp, Homo sapiens
ggggtcagggcgaagtaccaggg

SEQ ID NO: 6594 - DNA, 23 bp, Homo sapiens
ggggtcagggcgaagtcccaggg

SEQ ID NO: 6595 - DNA, 23 bp, Homo sapiens
ggggtcccgcggcttcggggcgg

SEQ ID NO: 6596 - DNA, 23 bp, Homo sapiens
ggggtcccgcggcttcggggtgg

SEQ ID NO: 6597 - DNA, 23 bp, Homo sapiens
ggggtcctgaccctgctgaaggg

SEQ ID NO: 6598 - DNA, 23 bp, Homo sapiens
ggggtcctgacctgcgcccccgg

SEQ ID NO: 6599 - DNA, 23 bp, Homo sapiens
ggggtcgggacctgcgccccggg

SEQ ID NO: 6600 - DNA, 23 bp, Homo sapiens
ggggtcgtgacctgcgcccccgg

SEQ ID NO: 6601 - DNA, 23 bp, Homo sapiens
ggggtcgtgacctgcgccccggg

SEQ ID NO: 6602 - DNA, 23 bp, Homo sapiens
ggggtctagagtgggcggggggg

SEQ ID NO: 6603 - DNA, 23 bp, Homo sapiens
ggggtctagagtgggtggggtgg

SEQ ID NO: 6604 - DNA, 23 bp, Homo sapiens
ggggtgaagggatgaagggtggg

SEQ ID NO: 6605 - DNA, 23 bp, Homo sapiens
ggggtgaaggggtgaagggtggg

SEQ ID NO: 6606 - DNA, 23 bp, Homo sapiens
ggggtggcaggtctgggggtggg

SEQ ID NO: 6607 - DNA, 23 bp, Homo sapiens
ggggtggcgggtctggggcgggg

SEQ ID NO: 6608 - DNA, 23 bp, Homo sapiens
ggggtggcgggtctgggggtggg

SEQ ID NO: 6609 - DNA, 23 bp, Homo sapiens
ggggtggggagggggcagagggg

SEQ ID NO: 6610 - DNA, 23 bp, Homo sapiens
ggggtgggtgagctcccccacgg

SEQ ID NO: 6611 - DNA, 23 bp, Homo sapiens
ggggtgggtgagctcccccatgg

SEQ ID NO: 6612 - DNA, 23 bp, Homo sapiens
ggggtggttgagctcccccatgg

SEQ ID NO: 6613 - DNA, 23 bp, Homo sapiens
gggtagccgcgccgggaggaggg

SEQ ID NO: 6614 - DNA, 23 bp, Homo sapiens
gggtcacatgtgtctttgggggg

SEQ ID NO: 6615 - DNA, 23 bp, Homo sapiens
gggtcacgtgtgtctttgggggg

SEQ ID NO: 6616 - DNA, 23 bp, Homo sapiens
gggtcagggctgaggcttggagg

SEQ ID NO: 6617 - DNA, 23 bp, Homo sapiens
gggtcagggctgaggcttggggg

SEQ ID NO: 6618 - DNA, 23 bp, Homo sapiens
gggtcatatgtgtcttggggggg

SEQ ID NO: 6619 - DNA, 23 bp, Homo sapiens
gggtcccgcggcctcgggggcgg

SEQ ID NO: 6620 - DNA, 23 bp, Homo sapiens
gggtccgagatccgcccccgagg

SEQ ID NO: 6621 - DNA, 23 bp, Homo sapiens
gggtccggagtattgggacgggg

SEQ ID NO: 6622 - DNA, 23 bp, Homo sapiens
gggtcctgagcccccgcctgcgg

SEQ ID NO: 6623 - DNA, 23 bp, Homo sapiens
gggtcctgcgcccccgcctgcgg

SEQ ID NO: 6624 - DNA, 23 bp, Homo sapiens
gggtcgtgacctgcgcccccggg

SEQ ID NO: 6625 - DNA, 23 bp, Homo sapiens
gggtctagagtgggcgggggggg

SEQ ID NO: 6626 - DNA, 23 bp, Homo sapiens
gggtctagagtgggtgggggtgg

SEQ ID NO: 6627 - DNA, 23 bp, Homo sapiens
gggtgacctggcccgtccgtggg

SEQ ID NO: 6628 - DNA, 23 bp, Homo sapiens
gggtgagtgcggggtcgggaggg

SEQ ID NO: 6629 - DNA, 23 bp, Homo sapiens
gggtgccgtgacccgcatctcgg

SEQ ID NO: 6630 - DNA, 23 bp, Homo sapiens
gggtggcctcatggtcagagagg

SEQ ID NO: 6631 - DNA, 23 bp, Homo sapiens
gggtgggggtggcgggtctgggg

SEQ ID NO: 6632 - DNA, 23 bp, Homo sapiens
gggtggggtggcaggtctggggg

SEQ ID NO: 6633 - DNA, 23 bp, Homo sapiens
gggtggggtggcgggtctggggg

SEQ ID NO: 6634 - DNA, 23 bp, Homo sapiens
gggtgggtcggggcggggcgggg

SEQ ID NO: 6635 - DNA, 23 bp, Homo sapiens
gggtgggtgacttcagaaccggg

SEQ ID NO: 6636 - DNA, 23 bp, Homo sapiens
gggtgggtgagctcccccacggg

SEQ ID NO: 6637 - DNA, 23 bp, Homo sapiens
gggtgggtgagctcccccatggg

SEQ ID NO: 6638 - DNA, 23 bp, Homo sapiens
gggtggttgagctcccccatggg

SEQ ID NO: 6639 - DNA, 23 bp, Homo sapiens
gggttccgcagatccaccttggg

SEQ ID NO: 6640 - DNA, 23 bp, Homo sapiens
gggttgggcggggcggggcgggg

SEQ ID NO: 6641 - DNA, 23 bp, Homo sapiens
gggttggtcagggcggggcgggg

SEQ ID NO: 6642 - DNA, 23 bp, Homo sapiens
gggttggtcgggactggggcggg

SEQ ID NO: 6643 - DNA, 23 bp, Homo sapiens
gggttggtcggggccggacgggg

SEQ ID NO: 6644 - DNA, 23 bp, Homo sapiens
gggttggtcggggccgggcaggg

SEQ ID NO: 6645 - DNA, 23 bp, Homo sapiens
gggttggtcggggccgggcgggg

SEQ ID NO: 6646 - DNA, 23 bp, Homo sapiens
gggttggtcggggcggggcgggg

SEQ ID NO: 6647 - DNA, 23 bp, Homo sapiens
gggttggtcggggctgggcgggg

SEQ ID NO: 6648 - DNA, 23 bp, Homo sapiens
gggttggtcggggctggggcggg

SEQ ID NO: 6649 - DNA, 23 bp, Homo sapiens
gggttttcttgtcccactggggg

SEQ ID NO: 6650 - DNA, 23 bp, Homo sapiens
ggtaatggacattctttgattgg

SEQ ID NO: 6651 - DNA, 23 bp, Homo sapiens
ggtaatggagattctttgattgg

SEQ ID NO: 6652 - DNA, 23 bp, Homo sapiens
ggtaatggggatcctttgatagg

SEQ ID NO: 6653 - DNA, 23 bp, Homo sapiens
ggtaatggggatcctttgattgg

SEQ ID NO: 6654 - DNA, 23 bp, Homo sapiens
ggtaatggggattctttgattgg

SEQ ID NO: 6655 - DNA, 23 bp, Homo sapiens
ggtacagaatctggaaacccagg

SEQ ID NO: 6656 - DNA, 23 bp, Homo sapiens
ggtacaggatctggaaacccagg

SEQ ID NO: 6657 - DNA, 23 bp, Homo sapiens
ggtagaacaaaaacagaacctgg

SEQ ID NO: 6658 - DNA, 23 bp, Homo sapiens
ggtaggacaaaaacagaacctgg

SEQ ID NO: 6659 - DNA, 23 bp, Homo sapiens
ggtaggcccataattgtggatgg

SEQ ID NO: 6660 - DNA, 23 bp, Homo sapiens
ggtaggcccataattgtgggtgg

SEQ ID NO: 6661 - DNA, 23 bp, Homo sapiens
ggtaggcccatgattgtggacgg

SEQ ID NO: 6662 - DNA, 23 bp, Homo sapiens
ggtaggcccatgattgtggatgg

SEQ ID NO: 6663 - DNA, 23 bp, Homo sapiens
ggtaggcgccccgtggcccctgg

SEQ ID NO: 6664 - DNA, 23 bp, Homo sapiens
ggtaggctcataattgtggatgg

SEQ ID NO: 6665 - DNA, 23 bp, Homo sapiens
ggtagggaaggggtgaagagcgg

SEQ ID NO: 6666 - DNA, 23 bp, Homo sapiens
ggtagggaaggggtgaggagtgg

SEQ ID NO: 6667 - DNA, 23 bp, Homo sapiens
ggtagggaaggggtgaggggtgg

SEQ ID NO: 6668 - DNA, 23 bp, Homo sapiens
ggtcacagtggacacaagggtgg

SEQ ID NO: 6669 - DNA, 23 bp, Homo sapiens
ggtcacagtggacacaaggttgg

SEQ ID NO: 6670 - DNA, 23 bp, Homo sapiens
ggtcacagtggacacacagttgg

SEQ ID NO: 6671 - DNA, 23 bp, Homo sapiens
ggtcacagtggacacgggggtgg

SEQ ID NO: 6672 - DNA, 23 bp, Homo sapiens
ggtcacggtggacacgggggtgg

SEQ ID NO: 6673 - DNA, 23 bp, Homo sapiens
ggtcagggcggggcggggctcgg

SEQ ID NO: 6674 - DNA, 23 bp, Homo sapiens
ggtcatatgtgtcttgggggggg

SEQ ID NO: 6675 - DNA, 23 bp, Homo sapiens
ggtcatggtggacatcggggtgg

SEQ ID NO: 6676 - DNA, 23 bp, Homo sapiens
ggtcatggtggacatgggggtgg

SEQ ID NO: 6677 - DNA, 23 bp, Homo sapiens
ggtcccatcccctgcaggcctgg

SEQ ID NO: 6678 - DNA, 23 bp, Homo sapiens
ggtcccggacggggctctcaggg

SEQ ID NO: 6679 - DNA, 23 bp, Homo sapiens
ggtcccgggcggggctctcaggg

SEQ ID NO: 6680 - DNA, 23 bp, Homo sapiens
ggtcccgggcggggctctctggg

SEQ ID NO: 6681 - DNA, 23 bp, Homo sapiens
ggtcccgggcggggttctcaggg

SEQ ID NO: 6682 - DNA, 23 bp, Homo sapiens
ggtccctgacgacagatctcagg

SEQ ID NO: 6683 - DNA, 23 bp, Homo sapiens
ggtccctgaggacagacctcagg

SEQ ID NO: 6684 - DNA, 23 bp, Homo sapiens
ggtccctgaggaccttcaggagg

SEQ ID NO: 6685 - DNA, 23 bp, Homo sapiens
ggtccgcgtcgtgagtatccagg

SEQ ID NO: 6686 - DNA, 23 bp, Homo sapiens
ggtcctgcgcccccgccaggagg

SEQ ID NO: 6687 - DNA, 23 bp, Homo sapiens
ggtcctgcgcccccgccaggcgg

SEQ ID NO: 6688 - DNA, 23 bp, Homo sapiens
ggtcctgcgcccccgccgggcgg

SEQ ID NO: 6689 - DNA, 23 bp, Homo sapiens
ggtcctgcgccctcgccgggagg

SEQ ID NO: 6690 - DNA, 23 bp, Homo sapiens
ggtcctgcgccctcgccgggcgg

SEQ ID NO: 6691 - DNA, 23 bp, Homo sapiens
ggtcctgcgtccccgccgggcgg

SEQ ID NO: 6692 - DNA, 23 bp, Homo sapiens
ggtccttgggatattgtggttgg

SEQ ID NO: 6693 - DNA, 23 bp, Homo sapiens
ggtccttgggatattgtgtttgg

SEQ ID NO: 6694 - DNA, 23 bp, Homo sapiens
ggtcgcagccaaacatccactgg

SEQ ID NO: 6695 - DNA, 23 bp, Homo sapiens
ggtcgcagccaaacatcctctgg

SEQ ID NO: 6696 - DNA, 23 bp, Homo sapiens
ggtcgcagccacacatccactgg

SEQ ID NO: 6697 - DNA, 23 bp, Homo sapiens
ggtcgcagccagacatcctctgg

SEQ ID NO: 6698 - DNA, 23 bp, Homo sapiens
ggtcgcagccatacatcctctgg

SEQ ID NO: 6699 - DNA, 23 bp, Homo sapiens
ggtcgcagccgtacatccactgg

SEQ ID NO: 6700 - DNA, 23 bp, Homo sapiens
ggtcggcccatgattgtggaagg

SEQ ID NO: 6701 - DNA, 23 bp, Homo sapiens
ggtcggcccatgattgtggatgg

SEQ ID NO: 6702 - DNA, 23 bp, Homo sapiens
ggtcggggccggacggggctcgg

SEQ ID NO: 6703 - DNA, 23 bp, Homo sapiens
ggtcggggccgggcagggcttgg

SEQ ID NO: 6704 - DNA, 23 bp, Homo sapiens
ggtcggggccgggcggggctcgg

SEQ ID NO: 6705 - DNA, 23 bp, Homo sapiens
ggtcggggcggggcggggcgggg

SEQ ID NO: 6706 - DNA, 23 bp, Homo sapiens
ggtcggggcggggcggggctcgg

SEQ ID NO: 6707 - DNA, 23 bp, Homo sapiens
ggtcggggctgggcggggctcgg

SEQ ID NO: 6708 - DNA, 23 bp, Homo sapiens
ggtctagagtgggcggggggggg

SEQ ID NO: 6709 - DNA, 23 bp, Homo sapiens
ggtctgcagtcacacatttctgg

SEQ ID NO: 6710 - DNA, 23 bp, Homo sapiens
ggtctgcattcacacatttctgg

SEQ ID NO: 6711 - DNA, 23 bp, Homo sapiens
ggtcttgcgcccccgccaggcgg

SEQ ID NO: 6712 - DNA, 23 bp, Homo sapiens
ggtgaaatacctcatggagtggg

SEQ ID NO: 6713 - DNA, 23 bp, Homo sapiens
ggtgacctcatggtcagagatgg

SEQ ID NO: 6714 - DNA, 23 bp, Homo sapiens
ggtgacctggcccgtccgtgggg

SEQ ID NO: 6715 - DNA, 23 bp, Homo sapiens
ggtgagtcatatgcgtcctgggg

SEQ ID NO: 6716 - DNA, 23 bp, Homo sapiens
ggtgagtcatatgcgtcttgggg

SEQ ID NO: 6717 - DNA, 23 bp, Homo sapiens
ggtgagtcatatgcgttttgggg

SEQ ID NO: 6718 - DNA, 23 bp, Homo sapiens
ggtgagtcatatgtgtcttgggg

SEQ ID NO: 6719 - DNA, 23 bp, Homo sapiens
ggtgatgtatggctgcgacgtgg

SEQ ID NO: 6720 - DNA, 23 bp, Homo sapiens
ggtgcttccagtaacaaggcggg

SEQ ID NO: 6721 - DNA, 23 bp, Homo sapiens
ggtgcttccagtaacgaggtggg

SEQ ID NO: 6722 - DNA, 23 bp, Homo sapiens
ggtggagaaggggtgaaaggtgg

SEQ ID NO: 6723 - DNA, 23 bp, Homo sapiens
ggtggagaaggggtgaagggtgg

SEQ ID NO: 6724 - DNA, 23 bp, Homo sapiens
ggtggcctcatggtcagagacgg

SEQ ID NO: 6725 - DNA, 23 bp, Homo sapiens
ggtggcctcatggtcagagaggg

SEQ ID NO: 6726 - DNA, 23 bp, Homo sapiens
ggtggcctcatggtcagagatgg

SEQ ID NO: 6727 - DNA, 23 bp, Homo sapiens
ggtgggcccatgattgtgggtgg

SEQ ID NO: 6728 - DNA, 23 bp, Homo sapiens
ggtggggaagggatgaagggtgg

SEQ ID NO: 6729 - DNA, 23 bp, Homo sapiens
ggtggggaaggggtgaagggtgg

SEQ ID NO: 6730 - DNA, 23 bp, Homo sapiens
ggtggggcacacttctacctggg

SEQ ID NO: 6731 - DNA, 23 bp, Homo sapiens
ggtgggtcacatgtgtctttggg

SEQ ID NO: 6732 - DNA, 23 bp, Homo sapiens
ggtgggtcacgtgtgtctttggg

SEQ ID NO: 6733 - DNA, 23 bp, Homo sapiens
ggtgggtcatatgtgtcttgggg

SEQ ID NO: 6734 - DNA, 23 bp, Homo sapiens
ggtggtgcttcccagtaacgagg

SEQ ID NO: 6735 - DNA, 23 bp, Homo sapiens
ggtggtggggcagaggggaaagg

SEQ ID NO: 6736 - DNA, 23 bp, Homo sapiens
ggtgtcgtccacgtagcccacgg

SEQ ID NO: 6737 - DNA, 23 bp, Homo sapiens
ggtgtgacccctcactgtgatgg

SEQ ID NO: 6738 - DNA, 23 bp, Homo sapiens
ggttccatcccctgcaggcctgg

SEQ ID NO: 6739 - DNA, 23 bp, Homo sapiens
ggttccatctcctgctggcctgg

SEQ ID NO: 6740 - DNA, 23 bp, Homo sapiens
ggttcccaaggctgctgcagggg

SEQ ID NO: 6741 - DNA, 23 bp, Homo sapiens
ggttccgcagatccaccttgggg

SEQ ID NO: 6742 - DNA, 23 bp, Homo sapiens
ggttctatctcctgctggtctgg

SEQ ID NO: 6743 - DNA, 23 bp, Homo sapiens
ggttctgtctcctgctggtctgg

SEQ ID NO: 6744 - DNA, 23 bp, Homo sapiens
ggttgggagaagtgaaactcagg

SEQ ID NO: 6745 - DNA, 23 bp, Homo sapiens
ggttggtcgggactggggcgggg

SEQ ID NO: 6746 - DNA, 23 bp, Homo sapiens
ggttggtcggggctggggcgggg

SEQ ID NO: 6747 - DNA, 23 bp, Homo sapiens
ggtttaggccaaaatccccgcgg

SEQ ID NO: 6748 - DNA, 23 bp, Homo sapiens
gtaaagtgactcagaagtgctgg

SEQ ID NO: 6749 - DNA, 23 bp, Homo sapiens
gtaagcgatgacactctgaacgg

SEQ ID NO: 6750 - DNA, 23 bp, Homo sapiens
gtaagtctgtgtgttggtcttgg

SEQ ID NO: 6751 - DNA, 23 bp, Homo sapiens
gtaagtgatgacactctgaacgg

SEQ ID NO: 6752 - DNA, 23 bp, Homo sapiens
gtaatccttgccgtcgtaggcgg

SEQ ID NO: 6753 - DNA, 23 bp, Homo sapiens
gtaatggacattctttgattggg

SEQ ID NO: 6754 - DNA, 23 bp, Homo sapiens
gtaatggagattctttgattggg

SEQ ID NO: 6755 - DNA, 23 bp, Homo sapiens
gtaatggggatcctttgataggg

SEQ ID NO: 6756 - DNA, 23 bp, Homo sapiens
gtaatggggatcctttgattggg

SEQ ID NO: 6757 - DNA, 23 bp, Homo sapiens
gtaatggggattctttgattggg

SEQ ID NO: 6758 - DNA, 23 bp, Homo sapiens
gtacggctgcgacgtggggccgg

SEQ ID NO: 6759 - DNA, 23 bp, Homo sapiens
gtagaaatacctcatggagtggg

SEQ ID NO: 6760 - DNA, 23 bp, Homo sapiens
gtagaaatacttcatggagtggg

SEQ ID NO: 6761 - DNA, 23 bp, Homo sapiens
gtagaacaaaaaaaaagacctgg

SEQ ID NO: 6762 - DNA, 23 bp, Homo sapiens
gtagcccacggcgatgaagcggg

SEQ ID NO: 6763 - DNA, 23 bp, Homo sapiens
gtagcccacggtgatgaagcggg

SEQ ID NO: 6764 - DNA, 23 bp, Homo sapiens
gtagcccactgagatgaagcggg

SEQ ID NO: 6765 - DNA, 23 bp, Homo sapiens
gtagcccactgcaatgaagcggg

SEQ ID NO: 6766 - DNA, 23 bp, Homo sapiens
gtagcccactgcgatgaagcggg

SEQ ID NO: 6767 - DNA, 23 bp, Homo sapiens
gtagcccactgcgatgaagtggg

SEQ ID NO: 6768 - DNA, 23 bp, Homo sapiens
gtaggaggaagagctcaggtagg

SEQ ID NO: 6769 - DNA, 23 bp, Homo sapiens
gtaggaggaagagttcaggtagg

SEQ ID NO: 6770 - DNA, 23 bp, Homo sapiens
gtaggcataatgtgaggaggtgg

SEQ ID NO: 6771 - DNA, 23 bp, Homo sapiens
gtaggctgggaagatggctctgg

SEQ ID NO: 6772 - DNA, 23 bp, Homo sapiens
gtagggaaggggtgaagagcggg

SEQ ID NO: 6773 - DNA, 23 bp, Homo sapiens
gtagggaaggggtgaggagtggg

SEQ ID NO: 6774 - DNA, 23 bp, Homo sapiens
gtagggaaggggtgaggggtggg

SEQ ID NO: 6775 - DNA, 23 bp, Homo sapiens
gtagttctggaaacttctcttgg

SEQ ID NO: 6776 - DNA, 23 bp, Homo sapiens
gtatggctgccacgtggggtcgg

SEQ ID NO: 6777 - DNA, 23 bp, Homo sapiens
gtatggctgcgacctggggccgg

SEQ ID NO: 6778 - DNA, 23 bp, Homo sapiens
gtatggctgcgacgtggggccgg

SEQ ID NO: 6779 - DNA, 23 bp, Homo sapiens
gtatggctgcgacgtggggtcgg

SEQ ID NO: 6780 - DNA, 23 bp, Homo sapiens
gtcacaggggaaggtccctgagg

SEQ ID NO: 6781 - DNA, 23 bp, Homo sapiens
gtcacagtggacacaagggtggg

SEQ ID NO: 6782 - DNA, 23 bp, Homo sapiens
gtcacagtggacacaaggttggg

SEQ ID NO: 6783 - DNA, 23 bp, Homo sapiens
gtcacagtggacacacagttggg

SEQ ID NO: 6784 - DNA, 23 bp, Homo sapiens
gtcacagtggacacgggggtggg

SEQ ID NO: 6785 - DNA, 23 bp, Homo sapiens
gtcacgagtatcctggaagaagg

SEQ ID NO: 6786 - DNA, 23 bp, Homo sapiens
gtcacggtggacacgggggtggg

SEQ ID NO: 6787 - DNA, 23 bp, Homo sapiens
gtcactcaccggcctcgctctgg

SEQ ID NO: 6788 - DNA, 23 bp, Homo sapiens
gtcactcaccgtcctcgctctgg

SEQ ID NO: 6789 - DNA, 23 bp, Homo sapiens
gtcactcactggcctcgctctgg

SEQ ID NO: 6790 - DNA, 23 bp, Homo sapiens
gtcagagcccacaggagacgtgg

SEQ ID NO: 6791 - DNA, 23 bp, Homo sapiens
gtcagagcccacaggagatgtgg

SEQ ID NO: 6792 - DNA, 23 bp, Homo sapiens
gtcagagcccgcaggagacgtgg

SEQ ID NO: 6793 - DNA, 23 bp, Homo sapiens
gtcagagcccgcaggagatgtgg

SEQ ID NO: 6794 - DNA, 23 bp, Homo sapiens
gtcagagccctcaggagacgtgg

SEQ ID NO: 6795 - DNA, 23 bp, Homo sapiens
gtcagatcccacagaacatgtgg

SEQ ID NO: 6796 - DNA, 23 bp, Homo sapiens
gtcagatcccacagaagatgtgg

SEQ ID NO: 6797 - DNA, 23 bp, Homo sapiens
gtcagggccatgcgatcttaggg

SEQ ID NO: 6798 - DNA, 23 bp, Homo sapiens
gtcagggcggggcggggctcggg

SEQ ID NO: 6799 - DNA, 23 bp, Homo sapiens
gtcatgagtattcaggaagaagg

SEQ ID NO: 6800 - DNA, 23 bp, Homo sapiens
gtcatggtggacatcggggtggg

SEQ ID NO: 6801 - DNA, 23 bp, Homo sapiens
gtcatggtggacatgggggtggg

SEQ ID NO: 6802 - DNA, 23 bp, Homo sapiens
gtcccaggctgggatggcccagg

SEQ ID NO: 6803 - DNA, 23 bp, Homo sapiens
gtcccatgacagatgcaaaatgg

SEQ ID NO: 6804 - DNA, 23 bp, Homo sapiens
gtcccgcggcctcagggaggcgg

SEQ ID NO: 6805 - DNA, 23 bp, Homo sapiens
gtcccgcggcctcaggggggcgg

SEQ ID NO: 6806 - DNA, 23 bp, Homo sapiens
gtcccgcggcctcaggggggtgg

SEQ ID NO: 6807 - DNA, 23 bp, Homo sapiens
gtcccgcggcctcagggggtcgg

SEQ ID NO: 6808 - DNA, 23 bp, Homo sapiens
gtccctagaatactgatcagggg

SEQ ID NO: 6809 - DNA, 23 bp, Homo sapiens
gtccctaggatagtgatcagggg

SEQ ID NO: 6810 - DNA, 23 bp, Homo sapiens
gtccctgaggaccttcaggaggg

SEQ ID NO: 6811 - DNA, 23 bp, Homo sapiens
gtccctggaatactgatcagggg

SEQ ID NO: 6812 - DNA, 23 bp, Homo sapiens
gtccctgttagcataatgtgagg

SEQ ID NO: 6813 - DNA, 23 bp, Homo sapiens
gtccctgttagcctaatgtgagg

SEQ ID NO: 6814 - DNA, 23 bp, Homo sapiens
gtccgagatccacccccctgagg

SEQ ID NO: 6815 - DNA, 23 bp, Homo sapiens
gtccgagatccgaccccctgagg

SEQ ID NO: 6816 - DNA, 23 bp, Homo sapiens
gtccgagatccgcccccctgagg

SEQ ID NO: 6817 - DNA, 23 bp, Homo sapiens
gtccgagatccgcctccctgagg

SEQ ID NO: 6818 - DNA, 23 bp, Homo sapiens
gtccggccccgaccaacccgggg

SEQ ID NO: 6819 - DNA, 23 bp, Homo sapiens
gtcctagcagttgtggtcatcgg

SEQ ID NO: 6820 - DNA, 23 bp, Homo sapiens
gtcctccccatcccactgccagg

SEQ ID NO: 6821 - DNA, 23 bp, Homo sapiens
gtcctccccatcccgctgccagg

SEQ ID NO: 6822 - DNA, 23 bp, Homo sapiens
gtcctcgccatcccgctgccagg

SEQ ID NO: 6823 - DNA, 23 bp, Homo sapiens
gtcctgcgcccccgccaggaggg

SEQ ID NO: 6824 - DNA, 23 bp, Homo sapiens
gtcctgcgcccccgccaggcggg

SEQ ID NO: 6825 - DNA, 23 bp, Homo sapiens
gtcctgcgcccccgccgggcggg

SEQ ID NO: 6826 - DNA, 23 bp, Homo sapiens
gtcctgcgccctcgccgggaggg

SEQ ID NO: 6827 - DNA, 23 bp, Homo sapiens
gtcctgcgccctcgccgggcggg

SEQ ID NO: 6828 - DNA, 23 bp, Homo sapiens
gtcctgcgtccccgccgggcggg

SEQ ID NO: 6829 - DNA, 23 bp, Homo sapiens
gtccttgggatattgtggttggg

SEQ ID NO: 6830 - DNA, 23 bp, Homo sapiens
gtccttgggatattgtgtttggg

SEQ ID NO: 6831 - DNA, 23 bp, Homo sapiens
gtcgaaatacctcatggagtggg

SEQ ID NO: 6832 - DNA, 23 bp, Homo sapiens
gtcgggactggggcggggctcgg

SEQ ID NO: 6833 - DNA, 23 bp, Homo sapiens
gtcggggccggacggggctcggg

SEQ ID NO: 6834 - DNA, 23 bp, Homo sapiens
gtcggggccgggcagggcttggg

SEQ ID NO: 6835 - DNA, 23 bp, Homo sapiens
gtcggggccgggcggggctcggg

SEQ ID NO: 6836 - DNA, 23 bp, Homo sapiens
gtcggggcggggcggggctcggg

SEQ ID NO: 6837 - DNA, 23 bp, Homo sapiens
gtcggggctgggcggggctcggg

SEQ ID NO: 6838 - DNA, 23 bp, Homo sapiens
gtcggggctggggcggggctcgg

SEQ ID NO: 6839 - DNA, 23 bp, Homo sapiens
gtcgtgagtatccaggaagaagg

SEQ ID NO: 6840 - DNA, 23 bp, Homo sapiens
gtcgtgagtatccaggatgaagg

SEQ ID NO: 6841 - DNA, 23 bp, Homo sapiens
gtctagagtgggcgggggggcgg

SEQ ID NO: 6842 - DNA, 23 bp, Homo sapiens
gtctagagtgggtggggtggcgg

SEQ ID NO: 6843 - DNA, 23 bp, Homo sapiens
gtctccccgtcccaatactccgg

SEQ ID NO: 6844 - DNA, 23 bp, Homo sapiens
gtctcccggtcccaatactccgg

SEQ ID NO: 6845 - DNA, 23 bp, Homo sapiens
gtctcctcgtcccaatactccgg

SEQ ID NO: 6846 - DNA, 23 bp, Homo sapiens
gtctcctgagggctctgaccagg

SEQ ID NO: 6847 - DNA, 23 bp, Homo sapiens
gtctcctgcgggctctgaccagg

SEQ ID NO: 6848 - DNA, 23 bp, Homo sapiens
gtctcctggtcccaatactcagg

SEQ ID NO: 6849 - DNA, 23 bp, Homo sapiens
gtctcctggtcccaatactccgg

SEQ ID NO: 6850 - DNA, 23 bp, Homo sapiens
gtctcctgtgggctctgaccagg

SEQ ID NO: 6851 - DNA, 23 bp, Homo sapiens
gtctcggagtcccgcggcttcgg

SEQ ID NO: 6852 - DNA, 23 bp, Homo sapiens
gtctcggggtcccgcggcttcgg

SEQ ID NO: 6853 - DNA, 23 bp, Homo sapiens
gtctgagatccaccccaaggtgg

SEQ ID NO: 6854 - DNA, 23 bp, Homo sapiens
gtctgaggagactctgagtccgg

SEQ ID NO: 6855 - DNA, 23 bp, Homo sapiens
gtctgaggagattctgagtccgg

SEQ ID NO: 6856 - DNA, 23 bp, Homo sapiens
gtctgaggagattttgagtccgg

SEQ ID NO: 6857 - DNA, 23 bp, Homo sapiens
gtctgcaggtcccaatactccgg

SEQ ID NO: 6858 - DNA, 23 bp, Homo sapiens
gtctgccaagtgtgagaccctgg

SEQ ID NO: 6859 - DNA, 23 bp, Homo sapiens
gtctggctgcgacgtggggccgg

SEQ ID NO: 6860 - DNA, 23 bp, Homo sapiens
gtctggggagaatccgagtccgg

SEQ ID NO: 6861 - DNA, 23 bp, Homo sapiens
gtctggggagaatctgagtccgg

SEQ ID NO: 6862 - DNA, 23 bp, Homo sapiens
gtcttcccctccatttcctcagg

SEQ ID NO: 6863 - DNA, 23 bp, Homo sapiens
gtcttgcgcccccgccaggcggg

SEQ ID NO: 6864 - DNA, 23 bp, Homo sapiens
gtgaacctgcggaaactgcgcgg

SEQ ID NO: 6865 - DNA, 23 bp, Homo sapiens
gtgaacctgcggaacctgcgcgg

SEQ ID NO: 6866 - DNA, 23 bp, Homo sapiens
gtgaccagcctgagaatggacgg

SEQ ID NO: 6867 - DNA, 23 bp, Homo sapiens
gtgaccccagcccggggcgcagg

SEQ ID NO: 6868 - DNA, 23 bp, Homo sapiens
gtgaccccgcccgggggcgcagg

SEQ ID NO: 6869 - DNA, 23 bp, Homo sapiens
gtgaccccggcccggggcgcagg

SEQ ID NO: 6870 - DNA, 23 bp, Homo sapiens
gtgaccccggccgggggcgcagg

SEQ ID NO: 6871 - DNA, 23 bp, Homo sapiens
gtgaccccggcctggggcgcagg

SEQ ID NO: 6872 - DNA, 23 bp, Homo sapiens
gtgacctcatggtcagagatggg

SEQ ID NO: 6873 - DNA, 23 bp, Homo sapiens
gtgacctgcgccccaggccgggg

SEQ ID NO: 6874 - DNA, 23 bp, Homo sapiens
gtgacctgcgcccccggccgggg

SEQ ID NO: 6875 - DNA, 23 bp, Homo sapiens
gtgacctgcgcccccgggcgggg

SEQ ID NO: 6876 - DNA, 23 bp, Homo sapiens
gtgacctgcgccccgggccgggg

SEQ ID NO: 6877 - DNA, 23 bp, Homo sapiens
gtgacctgcgccccgggctgggg

SEQ ID NO: 6878 - DNA, 23 bp, Homo sapiens
gtgacctggcccgtccgtggggg

SEQ ID NO: 6879 - DNA, 23 bp, Homo sapiens
gtgactggggacttcagaaccgg

SEQ ID NO: 6880 - DNA, 23 bp, Homo sapiens
gtgactggggactttagaaccgg

SEQ ID NO: 6881 - DNA, 23 bp, Homo sapiens
gtgagacagctgccttgtgtggg

SEQ ID NO: 6882 - DNA, 23 bp, Homo sapiens
gtgagcctgcggaacctgcgcgg

SEQ ID NO: 6883 - DNA, 23 bp, Homo sapiens
gtgagtcatatgcgtcctggggg

SEQ ID NO: 6884 - DNA, 23 bp, Homo sapiens
gtgagtcatatgcgtcttggggg

SEQ ID NO: 6885 - DNA, 23 bp, Homo sapiens
gtgagtcatatgcgttttggggg

SEQ ID NO: 6886 - DNA, 23 bp, Homo sapiens
gtgagtcatatgtgtcttggggg

SEQ ID NO: 6887 - DNA, 23 bp, Homo sapiens
gtgagtccgggtgggtgactggg

SEQ ID NO: 6888 - DNA, 23 bp, Homo sapiens
gtgatgtatggctgcgacgtggg

SEQ ID NO: 6889 - DNA, 23 bp, Homo sapiens
gtgcccgcggctccatcctctgg

SEQ ID NO: 6890 - DNA, 23 bp, Homo sapiens
gtgcgaggttgggagggaaacgg

SEQ ID NO: 6891 - DNA, 23 bp, Homo sapiens
gtgcgggatcgggagggaaatgg

SEQ ID NO: 6892 - DNA, 23 bp, Homo sapiens
gtgcggggtcggcagggaaatgg

SEQ ID NO: 6893 - DNA, 23 bp, Homo sapiens
gtgcggggtcgggagggaaacgg

SEQ ID NO: 6894 - DNA, 23 bp, Homo sapiens
gtgcggggtcgggagggaaatgg

SEQ ID NO: 6895 - DNA, 23 bp, Homo sapiens
gtgcggggttaggagggaaacgg

SEQ ID NO: 6896 - DNA, 23 bp, Homo sapiens
gtgcggggttgggagggaaacgg

SEQ ID NO: 6897 - DNA, 23 bp, Homo sapiens
gtgcggggttgggagggaagcgg

SEQ ID NO: 6898 - DNA, 23 bp, Homo sapiens
gtgcggggttgggagggaatcgg

SEQ ID NO: 6899 - DNA, 23 bp, Homo sapiens
gtgcgtggggactttagaactgg

SEQ ID NO: 6900 - DNA, 23 bp, Homo sapiens
gtgctagcacacagggtcccagg

SEQ ID NO: 6901 - DNA, 23 bp, Homo sapiens
gtgctggcacacagggtcccagg

SEQ ID NO: 6902 - DNA, 23 bp, Homo sapiens
gtgcttccagtaacaaggcgggg

SEQ ID NO: 6903 - DNA, 23 bp, Homo sapiens
gtgcttccagtaacgaggtgggg

SEQ ID NO: 6904 - DNA, 23 bp, Homo sapiens
gtgcttcccaggaatgagacagg

SEQ ID NO: 6905 - DNA, 23 bp, Homo sapiens
gtgcttcccagtaacgaggcagg

SEQ ID NO: 6906 - DNA, 23 bp, Homo sapiens
gtgcttcccagtaatgagacagg

SEQ ID NO: 6907 - DNA, 23 bp, Homo sapiens
gtggaaatacctcatggagtggg

SEQ ID NO: 6908 - DNA, 23 bp, Homo sapiens
gtggacacagctgtgctatgggg

SEQ ID NO: 6909 - DNA, 23 bp, Homo sapiens
gtggacctggggaccctgcgcgg

SEQ ID NO: 6910 - DNA, 23 bp, Homo sapiens
gtggacgcagctgtgctatgggg

SEQ ID NO: 6911 - DNA, 23 bp, Homo sapiens
gtggactgggaagacggctctgg

SEQ ID NO: 6912 - DNA, 23 bp, Homo sapiens
gtggactgggaagatggctctgg

SEQ ID NO: 6913 - DNA, 23 bp, Homo sapiens
gtggagaaggggtgaaaggtggg

SEQ ID NO: 6914 - DNA, 23 bp, Homo sapiens
gtggagaaggggtgaagggtggg

SEQ ID NO: 6915 - DNA, 23 bp, Homo sapiens
gtggatagagcaagaggggccgg

SEQ ID NO: 6916 - DNA, 23 bp, Homo sapiens
gtggatagagcaggaggagccgg

SEQ ID NO: 6917 - DNA, 23 bp, Homo sapiens
gtggatagagcaggaggggccgg

SEQ ID NO: 6918 - DNA, 23 bp, Homo sapiens
gtggatagagcaggagggtccgg

SEQ ID NO: 6919 - DNA, 23 bp, Homo sapiens
gtggatgtacggctgcgacctgg

SEQ ID NO: 6920 - DNA, 23 bp, Homo sapiens
gtggatgtatggctgcgacctgg

SEQ ID NO: 6921 - DNA, 23 bp, Homo sapiens
gtggatgtatggctgcgacgtgg

SEQ ID NO: 6922 - DNA, 23 bp, Homo sapiens
gtggatgtgtggctgcgacctgg

SEQ ID NO: 6923 - DNA, 23 bp, Homo sapiens
gtggatgtttggctgcgacctgg

SEQ ID NO: 6924 - DNA, 23 bp, Homo sapiens
gtggattgggaagatggctctgg

SEQ ID NO: 6925 - DNA, 23 bp, Homo sapiens
gtggcaggtctgggggtgggtgg

SEQ ID NO: 6926 - DNA, 23 bp, Homo sapiens
gtggcctcatggtcagagacggg

SEQ ID NO: 6927 - DNA, 23 bp, Homo sapiens
gtggcctcatggtcagagagggg

SEQ ID NO: 6928 - DNA, 23 bp, Homo sapiens
gtggcctcatggtcagagatggg

SEQ ID NO: 6929 - DNA, 23 bp, Homo sapiens
gtggcgggtctggggcggggtgg

SEQ ID NO: 6930 - DNA, 23 bp, Homo sapiens
gtggcgggtctgggggtgggtgg

SEQ ID NO: 6931 - DNA, 23 bp, Homo sapiens
gtggctagaggaggaattgtggg

SEQ ID NO: 6932 - DNA, 23 bp, Homo sapiens
gtggctgtggtggtgccttctgg

SEQ ID NO: 6933 - DNA, 23 bp, Homo sapiens
gtgggacaagaggaattatgggg

SEQ ID NO: 6934 - DNA, 23 bp, Homo sapiens
gtgggacaggaggaattaggggg

SEQ ID NO: 6935 - DNA, 23 bp, Homo sapiens
gtgggacaggaggaattatgggg

SEQ ID NO: 6936 - DNA, 23 bp, Homo sapiens
gtgggagacggcccatgaggcgg

SEQ ID NO: 6937 - DNA, 23 bp, Homo sapiens
gtgggagcctggggcaaggaggg

SEQ ID NO: 6938 - DNA, 23 bp, Homo sapiens
gtgggagcctgggggagaggagg

SEQ ID NO: 6939 - DNA, 23 bp, Homo sapiens
gtgggagcctgggggccaggagg

SEQ ID NO: 6940 - DNA, 23 bp, Homo sapiens
gtgggagcctgggggcgaggagg

SEQ ID NO: 6941 - DNA, 23 bp, Homo sapiens
gtgggagcctgggggtgaggagg

SEQ ID NO: 6942 - DNA, 23 bp, Homo sapiens
gtgggaggcggcccatgaggcgg

SEQ ID NO: 6943 - DNA, 23 bp, Homo sapiens
gtgggaggcggcccatgcggcgg

SEQ ID NO: 6944 - DNA, 23 bp, Homo sapiens
gtgggaggcggcccatgtggcgg

SEQ ID NO: 6945 - DNA, 23 bp, Homo sapiens
gtgggaggcggcccgtacggcgg

SEQ ID NO: 6946 - DNA, 23 bp, Homo sapiens
gtgggaggcggcccgtcgggcgg

SEQ ID NO: 6947 - DNA, 23 bp, Homo sapiens
gtgggaggcggcccgtgaggcgg

SEQ ID NO: 6948 - DNA, 23 bp, Homo sapiens
gtgggaggcggcccgtgcggcgg

SEQ ID NO: 6949 - DNA, 23 bp, Homo sapiens
gtgggaggcggcccgtgtggcgg

SEQ ID NO: 6950 - DNA, 23 bp, Homo sapiens
gtgggaggcggcccgttgggcgg

SEQ ID NO: 6951 - DNA, 23 bp, Homo sapiens
gtgggaggcggtccatgcggcgg

SEQ ID NO: 6952 - DNA, 23 bp, Homo sapiens
gtgggcgggggggcggggagggg

SEQ ID NO: 6953 - DNA, 23 bp, Homo sapiens
gtgggcggggggggcggggaggg

SEQ ID NO: 6954 - DNA, 23 bp, Homo sapiens
gtgggcgggggggggtggggtgg

SEQ ID NO: 6955 - DNA, 23 bp, Homo sapiens
gtgggcggggggggtggggtggg

SEQ ID NO: 6956 - DNA, 23 bp, Homo sapiens
gtgggctgggaagacagctctgg

SEQ ID NO: 6957 - DNA, 23 bp, Homo sapiens
gtgggctgggaagacggctctgg

SEQ ID NO: 6958 - DNA, 23 bp, Homo sapiens
gtgggctgggaagatggccctgg

SEQ ID NO: 6959 - DNA, 23 bp, Homo sapiens
gtgggctgggaagatggctctgg

SEQ ID NO: 6960 - DNA, 23 bp, Homo sapiens
gtggggaaaccgcctctgcgggg

SEQ ID NO: 6961 - DNA, 23 bp, Homo sapiens
gtggggaaaggcctgggtaatgg

SEQ ID NO: 6962 - DNA, 23 bp, Homo sapiens
gtggggaagggatgaagggtggg

SEQ ID NO: 6963 - DNA, 23 bp, Homo sapiens
gtggggaaggggtgaagggtggg

SEQ ID NO: 6964 - DNA, 23 bp, Homo sapiens
gtggggcacacttctacctgggg

SEQ ID NO: 6965 - DNA, 23 bp, Homo sapiens
gtgggggatggggaggggtcggg

SEQ ID NO: 6966 - DNA, 23 bp, Homo sapiens
gtggggtggggagggggcagagg

SEQ ID NO: 6967 - DNA, 23 bp, Homo sapiens
gtgggtcacatgtgtctttgggg

SEQ ID NO: 6968 - DNA, 23 bp, Homo sapiens
gtgggtcacgtgtgtctttgggg

SEQ ID NO: 6969 - DNA, 23 bp, Homo sapiens
gtgggtcatatgtgtcttggggg

SEQ ID NO: 6970 - DNA, 23 bp, Homo sapiens
gtgggtggagcaggaggggccgg

SEQ ID NO: 6971 - DNA, 23 bp, Homo sapiens
gtgggtggggcagaggggaaagg

SEQ ID NO: 6972 - DNA, 23 bp, Homo sapiens
gtgggtggggcagtggggaaagg

SEQ ID NO: 6973 - DNA, 23 bp, Homo sapiens
gtgggtgggggtggcgggtctgg

SEQ ID NO: 6974 - DNA, 23 bp, Homo sapiens
gtgggtggggtggcaggtctggg

SEQ ID NO: 6975 - DNA, 23 bp, Homo sapiens
gtgggtggggtggcgggtctggg

SEQ ID NO: 6976 - DNA, 23 bp, Homo sapiens
gtggtcgggggtggggcagaggg

SEQ ID NO: 6977 - DNA, 23 bp, Homo sapiens
gtggtctggggtggggcagaggg

SEQ ID NO: 6978 - DNA, 23 bp, Homo sapiens
gtggtgagtcatatgcgtcctgg

SEQ ID NO: 6979 - DNA, 23 bp, Homo sapiens
gtggtgagtcatatgcgtcttgg

SEQ ID NO: 6980 - DNA, 23 bp, Homo sapiens
gtggtgagtcatatgcgttttgg

SEQ ID NO: 6981 - DNA, 23 bp, Homo sapiens
gtggtgagtcatatgtgtcttgg

SEQ ID NO: 6982 - DNA, 23 bp, Homo sapiens
gtggtgggtcatatgtgtcttgg

SEQ ID NO: 6983 - DNA, 23 bp, Homo sapiens
gtgtccctcacagcttgtaaagg

SEQ ID NO: 6984 - DNA, 23 bp, Homo sapiens
gtgtctctcacagcttgaaaagg

SEQ ID NO: 6985 - DNA, 23 bp, Homo sapiens
gtgtctctcacagcttgtaaagg

SEQ ID NO: 6986 - DNA, 23 bp, Homo sapiens
gtgtcttgggggcgtctgtcagg

SEQ ID NO: 6987 - DNA, 23 bp, Homo sapiens
gtgtcttggggggggtctgacgg

SEQ ID NO: 6988 - DNA, 23 bp, Homo sapiens
gtgtcttgggggggtctgacggg

SEQ ID NO: 6989 - DNA, 23 bp, Homo sapiens
gtgtctttgggcgttctgacggg

SEQ ID NO: 6990 - DNA, 23 bp, Homo sapiens
gtgtctttggggggtctgatggg

SEQ ID NO: 6991 - DNA, 23 bp, Homo sapiens
gtgtctttgggggttctgacggg

SEQ ID NO: 6992 - DNA, 23 bp, Homo sapiens
gtgtctttgggtgttctgacggg

SEQ ID NO: 6993 - DNA, 23 bp, Homo sapiens
gtgtctttgggtgttctgatggg

SEQ ID NO: 6994 - DNA, 23 bp, Homo sapiens
gtgtgactgcagacccagggcgg

SEQ ID NO: 6995 - DNA, 23 bp, Homo sapiens
gtgtgccctgcctcgttactggg

SEQ ID NO: 6996 - DNA, 23 bp, Homo sapiens
gtgtggctgcgacgtggggtcgg

SEQ ID NO: 6997 - DNA, 23 bp, Homo sapiens
gtgtgtaggaggaagagctcagg

SEQ ID NO: 6998 - DNA, 23 bp, Homo sapiens
gtgttccctgcatcattactggg

SEQ ID NO: 6999 - DNA, 23 bp, Homo sapiens
gtgttccctgcctcattactggg

SEQ ID NO: 7000 - DNA, 23 bp, Homo sapiens
gtgttccggtcccaatactccgg

SEQ ID NO: 7001 - DNA, 23 bp, Homo sapiens
gtgttccggtcccaatattccgg

SEQ ID NO: 7002 - DNA, 23 bp, Homo sapiens
gtgtttcctgatcctgccctggg

SEQ ID NO: 7003 - DNA, 23 bp, Homo sapiens
gtgtttcctgatcctgccttggg

SEQ ID NO: 7004 - DNA, 23 bp, Homo sapiens
gttagcataatatgaggagttgg

SEQ ID NO: 7005 - DNA, 23 bp, Homo sapiens
gttagcataatgtgaggaggtgg

SEQ ID NO: 7006 - DNA, 23 bp, Homo sapiens
gttagcctaatgtgaggaggtgg

SEQ ID NO: 7007 - DNA, 23 bp, Homo sapiens
gttcaggtagggaaggggtgagg

SEQ ID NO: 7008 - DNA, 23 bp, Homo sapiens
gttcatgtaggcataatgtgagg

SEQ ID NO: 7009 - DNA, 23 bp, Homo sapiens
gttccagagaggtggggctgagg

SEQ ID NO: 7010 - DNA, 23 bp, Homo sapiens
gttcctgttagcataatatgagg

SEQ ID NO: 7011 - DNA, 23 bp, Homo sapiens
gttcctgttagcataatgtgagg

SEQ ID NO: 7012 - DNA, 23 bp, Homo sapiens
gttcgtgtaggcataatgtgagg

SEQ ID NO: 7013 - DNA, 23 bp, Homo sapiens
gttctctcggtaagtctgcgcgg

SEQ ID NO: 7014 - DNA, 23 bp, Homo sapiens
gttctggcacacagggtcccagg

SEQ ID NO: 7015 - DNA, 23 bp, Homo sapiens
gttcttgtaggcataatgtgagg

SEQ ID NO: 7016 - DNA, 23 bp, Homo sapiens
gttgaggccaaaatccccgcggg

SEQ ID NO: 7017 - DNA, 23 bp, Homo sapiens
gttgcagagaggtggggctgagg

SEQ ID NO: 7018 - DNA, 23 bp, Homo sapiens
gttggaggcggcccgtgaggcgg

SEQ ID NO: 7019 - DNA, 23 bp, Homo sapiens
gttggaggcggcccgtgcggcgg

SEQ ID NO: 7020 - DNA, 23 bp, Homo sapiens
gttggaggcggcccgtgtggcgg

SEQ ID NO: 7021 - DNA, 23 bp, Homo sapiens
gttgggagaagtgaaactcaggg

SEQ ID NO: 7022 - DNA, 23 bp, Homo sapiens
gttgggagggaaacggcctctgg

SEQ ID NO: 7023 - DNA, 23 bp, Homo sapiens
gttggggaatccccaaggctggg

SEQ ID NO: 7024 - DNA, 23 bp, Homo sapiens
gtttaggccaaaaatccccccgg

SEQ ID NO: 7025 - DNA, 23 bp, Homo sapiens
gtttaggccaaaaattcccccgg

SEQ ID NO: 7026 - DNA, 23 bp, Homo sapiens
gtttaggccaaaatccccgcggg

SEQ ID NO: 7027 - DNA, 23 bp, Homo sapiens
gtttggctgcgacctggggccgg

SEQ ID NO: 7028 - DNA, 23 bp, Homo sapiens
gtttggctgcgacgtggggccgg

SEQ ID NO: 7029 - DNA, 23 bp, Homo sapiens
gtttggctgcgacgtggggtcgg

SEQ ID NO: 7030 - DNA, 23 bp, Homo sapiens
gttttcccgagtttcctctgagg

SEQ ID NO: 7031 - DNA, 23 bp, Homo sapiens
gttttcctgagtttcctctgagg

SEQ ID NO: 7032 - DNA, 23 bp, Homo sapiens
gttttcctgagtttcttctgagg

SEQ ID NO: 7033 - DNA, 23 bp, Homo sapiens
taaaatctctgaaggaatgacgg

SEQ ID NO: 7034 - DNA, 23 bp, Homo sapiens
taaaatctctgaaggagtgacgg

SEQ ID NO: 7035 - DNA, 23 bp, Homo sapiens
taaaatctctgacggaatgacgg

SEQ ID NO: 7036 - DNA, 23 bp, Homo sapiens
taaagcacctgtgacaatgaagg

SEQ ID NO: 7037 - DNA, 23 bp, Homo sapiens
taaagcacctgttaaaatgaagg

SEQ ID NO: 7038 - DNA, 23 bp, Homo sapiens
taaagcccgcacgcacccaccgg

SEQ ID NO: 7039 - DNA, 23 bp, Homo sapiens
taaagtccgcacgcacccaccgg

SEQ ID NO: 7040 - DNA, 23 bp, Homo sapiens
taaggcgcctgggcctctcccgg

SEQ ID NO: 7041 - DNA, 23 bp, Homo sapiens
taagggataaaaatctctgaagg

SEQ ID NO: 7042 - DNA, 23 bp, Homo sapiens
taatcttctattccctgagaagg

SEQ ID NO: 7043 - DNA, 23 bp, Homo sapiens
taatcttctattccctgaggagg

SEQ ID NO: 7044 - DNA, 23 bp, Homo sapiens
taatgtatggctgcgacgtgggg

SEQ ID NO: 7045 - DNA, 23 bp, Homo sapiens
taattgtcctagagagaagaggg

SEQ ID NO: 7046 - DNA, 23 bp, Homo sapiens
taattgtcctagagagcagacgg

SEQ ID NO: 7047 - DNA, 23 bp, Homo sapiens
taattgtcctagagagcagaggg

SEQ ID NO: 7048 - DNA, 23 bp, Homo sapiens
taattgtctagagagaagagggg

SEQ ID NO: 7049 - DNA, 23 bp, Homo sapiens
tacaccgccatgtcccggcccgg

SEQ ID NO: 7050 - DNA, 23 bp, Homo sapiens
tacaccgccatgtcccggcctgg

SEQ ID NO: 7051 - DNA, 23 bp, Homo sapiens
tacaccgccgtgtcccggcccgg

SEQ ID NO: 7052 - DNA, 23 bp, Homo sapiens
tacaccgctgtgtcccggcccgg

SEQ ID NO: 7053 - DNA, 23 bp, Homo sapiens
tacacctccatgtcccggcccgg

SEQ ID NO: 7054 - DNA, 23 bp, Homo sapiens
tacacctccgtgtcccggcccgg

SEQ ID NO: 7055 - DNA, 23 bp, Homo sapiens
tacacttccgtgtcccggcccgg

SEQ ID NO: 7056 - DNA, 23 bp, Homo sapiens
tacagacccaaggcaggatcagg

SEQ ID NO: 7057 - DNA, 23 bp, Homo sapiens
tacagacccagggcaggatcagg

SEQ ID NO: 7058 - DNA, 23 bp, Homo sapiens
tacaggatctggaacccaggagg

SEQ ID NO: 7059 - DNA, 23 bp, Homo sapiens
taccaccaggacgcctacgacgg

SEQ ID NO: 7060 - DNA, 23 bp, Homo sapiens
taccagcaggacgcctacgacgg

SEQ ID NO: 7061 - DNA, 23 bp, Homo sapiens
taccagcaggacgcttacgacgg

SEQ ID NO: 7062 - DNA, 23 bp, Homo sapiens
taccagcagtcacaagtcacagg

SEQ ID NO: 7063 - DNA, 23 bp, Homo sapiens
tacccaatgggagtgggaagtgg

SEQ ID NO: 7064 - DNA, 23 bp, Homo sapiens
taccggcaggacgcctacgacgg

SEQ ID NO: 7065 - DNA, 23 bp, Homo sapiens
taccggcaggacgcttacgacgg

SEQ ID NO: 7066 - DNA, 23 bp, Homo sapiens
tacctcatggagtgagagcctgg

SEQ ID NO: 7067 - DNA, 23 bp, Homo sapiens
tacctcatggagtgggagactgg

SEQ ID NO: 7068 - DNA, 23 bp, Homo sapiens
tacctcatggagtgggagcctgg

SEQ ID NO: 7069 - DNA, 23 bp, Homo sapiens
tacctcatggattgggagcctgg

SEQ ID NO: 7070 - DNA, 23 bp, Homo sapiens
tacgactgcagacccagggcagg

SEQ ID NO: 7071 - DNA, 23 bp, Homo sapiens
tactacaaccagagcgaggacgg

SEQ ID NO: 7072 - DNA, 23 bp, Homo sapiens
tactacaaccagagcgaggccgg

SEQ ID NO: 7073 - DNA, 23 bp, Homo sapiens
tacttcaagtcacaaagggaagg

SEQ ID NO: 7074 - DNA, 23 bp, Homo sapiens
tacttcatggagtgggagcctgg

SEQ ID NO: 7075 - DNA, 23 bp, Homo sapiens
tacttctggaaattccttttggg

SEQ ID NO: 7076 - DNA, 23 bp, Homo sapiens
tagaggaggaattgtgaggtggg

SEQ ID NO: 7077 - DNA, 23 bp, Homo sapiens
tagaggaggaattgtggggtggg

SEQ ID NO: 7078 - DNA, 23 bp, Homo sapiens
tagagtgggcggggggggcgggg

SEQ ID NO: 7079 - DNA, 23 bp, Homo sapiens
tagagtgggcgggggggggtggg

SEQ ID NO: 7080 - DNA, 23 bp, Homo sapiens
tagagtgggcggggggggtgggg

SEQ ID NO: 7081 - DNA, 23 bp, Homo sapiens
tagcacacagggtcccaggctgg

SEQ ID NO: 7082 - DNA, 23 bp, Homo sapiens
tagcccacggcgatgaagcgggg

SEQ ID NO: 7083 - DNA, 23 bp, Homo sapiens
tagcccacggtgatgaagcgggg

SEQ ID NO: 7084 - DNA, 23 bp, Homo sapiens
tagcccactgagatgaagcgggg

SEQ ID NO: 7085 - DNA, 23 bp, Homo sapiens
tagcccactgcaatgaagcgggg

SEQ ID NO: 7086 - DNA, 23 bp, Homo sapiens
tagcccactgcgatgaagcgggg

SEQ ID NO: 7087 - DNA, 23 bp, Homo sapiens
tagcccactgcgatgaagtgggg

SEQ ID NO: 7088 - DNA, 23 bp, Homo sapiens
tagcggtgaccacagctccaagg

SEQ ID NO: 7089 - DNA, 23 bp, Homo sapiens
taggaggaagagctcaggtaggg

SEQ ID NO: 7090 - DNA, 23 bp, Homo sapiens
taggaggaagagttcaggtaggg

SEQ ID NO: 7091 - DNA, 23 bp, Homo sapiens
taggagggaaacggcctctgcgg

SEQ ID NO: 7092 - DNA, 23 bp, Homo sapiens
taggcataatgtgaggaggtggg

SEQ ID NO: 7093 - DNA, 23 bp, Homo sapiens
taggcgacccgggccgtccgtgg

SEQ ID NO: 7094 - DNA, 23 bp, Homo sapiens
taggctgggaagatggctctggg

SEQ ID NO: 7095 - DNA, 23 bp, Homo sapiens
tagggaaggggtgaagagcgggg

SEQ ID NO: 7096 - DNA, 23 bp, Homo sapiens
tagggaaggggtgaggagtgggg

SEQ ID NO: 7097 - DNA, 23 bp, Homo sapiens
tagggaaggggtgaggggtgggg

SEQ ID NO: 7098 - DNA, 23 bp, Homo sapiens
tagttctggaaacttctcttggg

SEQ ID NO: 7099 - DNA, 23 bp, Homo sapiens
tataaccagttagcctacgacgg

SEQ ID NO: 7100 - DNA, 23 bp, Homo sapiens
tataaccagttcgcctacgacgg

SEQ ID NO: 7101 - DNA, 23 bp, Homo sapiens
tatccaatacccaatgggagtgg

SEQ ID NO: 7102 - DNA, 23 bp, Homo sapiens
tatcccaggtccctgtgtccagg

SEQ ID NO: 7103 - DNA, 23 bp, Homo sapiens
tatcccaggtgcctgcgtccagg

SEQ ID NO: 7104 - DNA, 23 bp, Homo sapiens
tatcccaggtgcctgtgtccagg

SEQ ID NO: 7105 - DNA, 23 bp, Homo sapiens
tatccgacacccaatgggagtgg

SEQ ID NO: 7106 - DNA, 23 bp, Homo sapiens
tatctctgctcctctccagaagg

SEQ ID NO: 7107 - DNA, 23 bp, Homo sapiens
tatctctgctcctgtccagaagg

SEQ ID NO: 7108 - DNA, 23 bp, Homo sapiens
tatctctgctcttctccagaagg

SEQ ID NO: 7109 - DNA, 23 bp, Homo sapiens
tatctctgctcttgtccagaagg

SEQ ID NO: 7110 - DNA, 23 bp, Homo sapiens
tatctctgttcttgtccagaagg

SEQ ID NO: 7111 - DNA, 23 bp, Homo sapiens
tatctcttctcagggaaagcagg

SEQ ID NO: 7112 - DNA, 23 bp, Homo sapiens
tatctcttctcctttccagaagg

SEQ ID NO: 7113 - DNA, 23 bp, Homo sapiens
tatctgttctcagggaaagcagg

SEQ ID NO: 7114 - DNA, 23 bp, Homo sapiens
tatgaacagcacgcctacgacgg

SEQ ID NO: 7115 - DNA, 23 bp, Homo sapiens
tatgaccaggacgcctacgacgg

SEQ ID NO: 7116 - DNA, 23 bp, Homo sapiens
tatgaccagtacgcctacgacgg

SEQ ID NO: 7117 - DNA, 23 bp, Homo sapiens
tatgaccagtccgcctacgacgg

SEQ ID NO: 7118 - DNA, 23 bp, Homo sapiens
tatgaccagttcgcctacgacgg

SEQ ID NO: 7119 - DNA, 23 bp, Homo sapiens
tatgactacagacccaaggcagg

SEQ ID NO: 7120 - DNA, 23 bp, Homo sapiens
tatgactacagacccagggcagg

SEQ ID NO: 7121 - DNA, 23 bp, Homo sapiens
tatgactgcagacccagggcagg

SEQ ID NO: 7122 - DNA, 23 bp, Homo sapiens
tattgtggttgggagcccatggg

SEQ ID NO: 7123 - DNA, 23 bp, Homo sapiens
tattgtgtttgggagcccatggg

SEQ ID NO: 7124 - DNA, 23 bp, Homo sapiens
tattgtgtttgggagcccgtggg

SEQ ID NO: 7125 - DNA, 23 bp, Homo sapiens
tcaaagaatccccattacccagg

SEQ ID NO: 7126 - DNA, 23 bp, Homo sapiens
tcaaagaatctccattacccagg

SEQ ID NO: 7127 - DNA, 23 bp, Homo sapiens
tcaaagaatgtccattacccagg

SEQ ID NO: 7128 - DNA, 23 bp, Homo sapiens
tcaaaggatccccattacccagg

SEQ ID NO: 7129 - DNA, 23 bp, Homo sapiens
tcaaaggatccccattacctagg

SEQ ID NO: 7130 - DNA, 23 bp, Homo sapiens
tcaagggtctcggggtcccgcgg

SEQ ID NO: 7131 - DNA, 23 bp, Homo sapiens
tcacagctccaaagagaaccagg

SEQ ID NO: 7132 - DNA, 23 bp, Homo sapiens
tcacagctccaaggagaaccagg

SEQ ID NO: 7133 - DNA, 23 bp, Homo sapiens
tcacagctcctaggacagctagg

SEQ ID NO: 7134 - DNA, 23 bp, Homo sapiens
tcacaggggctaacgcagcctgg

SEQ ID NO: 7135 - DNA, 23 bp, Homo sapiens
tcaccctccctctgctcctgagg

SEQ ID NO: 7136 - DNA, 23 bp, Homo sapiens
tcaccctccctctggtcctgagg

SEQ ID NO: 7137 - DNA, 23 bp, Homo sapiens
tcaccgctatgatgtgtaggagg

SEQ ID NO: 7138 - DNA, 23 bp, Homo sapiens
tcaccttcccctcctttcccagg

SEQ ID NO: 7139 - DNA, 23 bp, Homo sapiens
tcacgacccctcatcccccacgg

SEQ ID NO: 7140 - DNA, 23 bp, Homo sapiens
tcacgacccctcatcccctacgg

SEQ ID NO: 7141 - DNA, 23 bp, Homo sapiens
tcacgacctctcatcccccacgg

SEQ ID NO: 7142 - DNA, 23 bp, Homo sapiens
tcacgactccccatcccccacgg

SEQ ID NO: 7143 - DNA, 23 bp, Homo sapiens
tcactcggtcagcctgtgcctgg

SEQ ID NO: 7144 - DNA, 23 bp, Homo sapiens
tcactcggtcagtctgtgcctgg

SEQ ID NO: 7145 - DNA, 23 bp, Homo sapiens
tcactctctggtacagaatctgg

SEQ ID NO: 7146 - DNA, 23 bp, Homo sapiens
tcactctctggtacaggatctgg

SEQ ID NO: 7147 - DNA, 23 bp, Homo sapiens
tcacttctcccaacctgcgtcgg

SEQ ID NO: 7148 - DNA, 23 bp, Homo sapiens
tcagaccaccaagcacaagtggg

SEQ ID NO: 7149 - DNA, 23 bp, Homo sapiens
tcagagcccacaggagacgtggg

SEQ ID NO: 7150 - DNA, 23 bp, Homo sapiens
tcagagcccacaggagatgtggg

SEQ ID NO: 7151 - DNA, 23 bp, Homo sapiens
tcagagcccgcaggagacgtggg

SEQ ID NO: 7152 - DNA, 23 bp, Homo sapiens
tcagagcccgcaggagatgtggg

SEQ ID NO: 7153 - DNA, 23 bp, Homo sapiens
tcagagccctcaggagacgtggg

SEQ ID NO: 7154 - DNA, 23 bp, Homo sapiens
tcagagtcactctctggtacagg

SEQ ID NO: 7155 - DNA, 23 bp, Homo sapiens
tcagatcaccaagcgcaagtggg

SEQ ID NO: 7156 - DNA, 23 bp, Homo sapiens
tcagatcacccagcgcaagtggg

SEQ ID NO: 7157 - DNA, 23 bp, Homo sapiens
tcagatcacccagcgcaagttgg

SEQ ID NO: 7158 - DNA, 23 bp, Homo sapiens
tcagatcacccagctcaagtggg

SEQ ID NO: 7159 - DNA, 23 bp, Homo sapiens
tcagatctcccagcgcaagtggg

SEQ ID NO: 7160 - DNA, 23 bp, Homo sapiens
tcagatctcccagcgcaagttgg

SEQ ID NO: 7161 - DNA, 23 bp, Homo sapiens
tcagccctgacccagctgaaggg

SEQ ID NO: 7162 - DNA, 23 bp, Homo sapiens
tcagccctgacccggctgaaggg

SEQ ID NO: 7163 - DNA, 23 bp, Homo sapiens
tcagccctgacctggctgaaggg

SEQ ID NO: 7164 - DNA, 23 bp, Homo sapiens
tcagcgtgggaagagggtcatgg

SEQ ID NO: 7165 - DNA, 23 bp, Homo sapiens
tcaggaaacatgaagaaagcagg

SEQ ID NO: 7166 - DNA, 23 bp, Homo sapiens
tcaggacccctcatcccccacgg

SEQ ID NO: 7167 - DNA, 23 bp, Homo sapiens
tcaggagggcgattggtccaggg

SEQ ID NO: 7168 - DNA, 23 bp, Homo sapiens
tcaggctgcgtgtaagtgatggg

SEQ ID NO: 7169 - DNA, 23 bp, Homo sapiens
tcaggctgcgtgtaagtggtggg

SEQ ID NO: 7170 - DNA, 23 bp, Homo sapiens
tcagggactagaattttccacgg

SEQ ID NO: 7171 - DNA, 23 bp, Homo sapiens
tcagggccatgcgatcttagggg

SEQ ID NO: 7172 - DNA, 23 bp, Homo sapiens
tcagggccttaaggtcctagagg

SEQ ID NO: 7173 - DNA, 23 bp, Homo sapiens
tcagggcggggcggggctcgggg

SEQ ID NO: 7174 - DNA, 23 bp, Homo sapiens
tcaggggaaggtccctgctaagg

SEQ ID NO: 7175 - DNA, 23 bp, Homo sapiens
tcaggtagggaaggggtgagggg

SEQ ID NO: 7176 - DNA, 23 bp, Homo sapiens
tcaggtggagaaggggtgaaagg

SEQ ID NO: 7177 - DNA, 23 bp, Homo sapiens
tcaggtggagaaggggtgaaggg

SEQ ID NO: 7178 - DNA, 23 bp, Homo sapiens
tcaggtggggaagggatgaaggg

SEQ ID NO: 7179 - DNA, 23 bp, Homo sapiens
tcaggtggggaaggggtgaaggg

SEQ ID NO: 7180 - DNA, 23 bp, Homo sapiens
tcatcccattctccattcaaggg

SEQ ID NO: 7181 - DNA, 23 bp, Homo sapiens
tcatcccccacggacggcccggg

SEQ ID NO: 7182 - DNA, 23 bp, Homo sapiens
tcatcccccacggacgggccagg

SEQ ID NO: 7183 - DNA, 23 bp, Homo sapiens
tcatcccccacggacgggccggg

SEQ ID NO: 7184 - DNA, 23 bp, Homo sapiens
tcatcccctacggacgggccagg

SEQ ID NO: 7185 - DNA, 23 bp, Homo sapiens
tcatctttcctgttccagagagg

SEQ ID NO: 7186 - DNA, 23 bp, Homo sapiens
tcatctttcctgttgcagagagg

SEQ ID NO: 7187 - DNA, 23 bp, Homo sapiens
tcatgccattctccattcaacgg

SEQ ID NO: 7188 - DNA, 23 bp, Homo sapiens
tcatgccattctccattcaaggg

SEQ ID NO: 7189 - DNA, 23 bp, Homo sapiens
tcatggtggacatcggggtgggg

SEQ ID NO: 7190 - DNA, 23 bp, Homo sapiens
tcatggtggacatgggggtgggg

SEQ ID NO: 7191 - DNA, 23 bp, Homo sapiens
tcatgtctcttagggaaagcagg

SEQ ID NO: 7192 - DNA, 23 bp, Homo sapiens
tcatgtcttttacggaaagcagg

SEQ ID NO: 7193 - DNA, 23 bp, Homo sapiens
tcatgtcttttagggaaagcagg

SEQ ID NO: 7194 - DNA, 23 bp, Homo sapiens
tccaacttttctgagtccttcgg

SEQ ID NO: 7195 - DNA, 23 bp, Homo sapiens
tccaagcctcagccctgacccgg

SEQ ID NO: 7196 - DNA, 23 bp, Homo sapiens
tccaagggccgtgtctgcactgg

SEQ ID NO: 7197 - DNA, 23 bp, Homo sapiens
tccaagggccgtgtctgcattgg

SEQ ID NO: 7198 - DNA, 23 bp, Homo sapiens
tccaatgaatagattatcccagg

SEQ ID NO: 7199 - DNA, 23 bp, Homo sapiens
tccacatccgtgtcccggcccgg

SEQ ID NO: 7200 - DNA, 23 bp, Homo sapiens
tccacatccgtgtcctggcccgg

SEQ ID NO: 7201 - DNA, 23 bp, Homo sapiens
tccaccccaaggtggatctgcgg

SEQ ID NO: 7202 - DNA, 23 bp, Homo sapiens
tccactgccgggccgggacacgg

SEQ ID NO: 7203 - DNA, 23 bp, Homo sapiens
tccagccagcgacagtgcccagg

SEQ ID NO: 7204 - DNA, 23 bp, Homo sapiens
tccagcttttctgagtccttcgg

SEQ ID NO: 7205 - DNA, 23 bp, Homo sapiens
tccaggcagcgacagtgcccagg

SEQ ID NO: 7206 - DNA, 23 bp, Homo sapiens
tccaggtctcgatcagggccagg

SEQ ID NO: 7207 - DNA, 23 bp, Homo sapiens
tccatgtcccggcccggccgcgg

SEQ ID NO: 7208 - DNA, 23 bp, Homo sapiens
tcccactcccattgggtgtcggg

SEQ ID NO: 7209 - DNA, 23 bp, Homo sapiens
tcccagcagtcacaagtcacagg

SEQ ID NO: 7210 - DNA, 23 bp, Homo sapiens
tcccagggccgtgtctgcattgg

SEQ ID NO: 7211 - DNA, 23 bp, Homo sapiens
tcccaggtgcctgcatccgctgg

SEQ ID NO: 7212 - DNA, 23 bp, Homo sapiens
tcccatcaccgccataatcaagg

SEQ ID NO: 7213 - DNA, 23 bp, Homo sapiens
tcccatcaccgccgtaatcaagg

SEQ ID NO: 7214 - DNA, 23 bp, Homo sapiens
tcccatcaccgctgtaatcaagg

SEQ ID NO: 7215 - DNA, 23 bp, Homo sapiens
tcccatcactgccgtaatcaagg

SEQ ID NO: 7216 - DNA, 23 bp, Homo sapiens
tcccattctccattcaagggagg

SEQ ID NO: 7217 - DNA, 23 bp, Homo sapiens
tcccattcttcaggtatctgcgg

SEQ ID NO: 7218 - DNA, 23 bp, Homo sapiens
tccccaattcccactcccattgg

SEQ ID NO: 7219 - DNA, 23 bp, Homo sapiens
tccccacttcccactcccattgg

SEQ ID NO: 7220 - DNA, 23 bp, Homo sapiens
tccccatttcccactcccattgg

SEQ ID NO: 7221 - DNA, 23 bp, Homo sapiens
tcccccacggacgggccaggtgg

SEQ ID NO: 7222 - DNA, 23 bp, Homo sapiens
tccccccaggttggtcggggcgg

SEQ ID NO: 7223 - DNA, 23 bp, Homo sapiens
tccccccgggtgggtcggggcgg

SEQ ID NO: 7224 - DNA, 23 bp, Homo sapiens
tccccccgggttggtcggggcgg

SEQ ID NO: 7225 - DNA, 23 bp, Homo sapiens
tcccccgggttggtcggggctgg

SEQ ID NO: 7226 - DNA, 23 bp, Homo sapiens
tccccgcgggttgggcggggcgg

SEQ ID NO: 7227 - DNA, 23 bp, Homo sapiens
tccccgcgggttggtcagggcgg

SEQ ID NO: 7228 - DNA, 23 bp, Homo sapiens
tccccgcgggttggtcggggcgg

SEQ ID NO: 7229 - DNA, 23 bp, Homo sapiens
tcccctccttaccccagctcagg

SEQ ID NO: 7230 - DNA, 23 bp, Homo sapiens
tcccgagagcagcaggaggacgg

SEQ ID NO: 7231 - DNA, 23 bp, Homo sapiens
tcccgagagcagcaggaggaggg

SEQ ID NO: 7232 - DNA, 23 bp, Homo sapiens
tcccgagagcagcaggatgaggg

SEQ ID NO: 7233 - DNA, 23 bp, Homo sapiens
tcccggcatggcctcccacgagg

SEQ ID NO: 7234 - DNA, 23 bp, Homo sapiens
tcccgggatggcctcccacgagg

SEQ ID NO: 7235 - DNA, 23 bp, Homo sapiens
tcccgggatggccttccacgagg

SEQ ID NO: 7236 - DNA, 23 bp, Homo sapiens
tcccgggctggcctcccacaagg

SEQ ID NO: 7237 - DNA, 23 bp, Homo sapiens
tcccgttctccaggtatccgcgg

SEQ ID NO: 7238 - DNA, 23 bp, Homo sapiens
tcccgttctccaggtatctgcgg

SEQ ID NO: 7239 - DNA, 23 bp, Homo sapiens
tcccgttctccaggtgtctgcgg

SEQ ID NO: 7240 - DNA, 23 bp, Homo sapiens
tcccgttcttcaggtatctgcgg

SEQ ID NO: 7241 - DNA, 23 bp, Homo sapiens
tccctccttaccccatctcaggg

SEQ ID NO: 7242 - DNA, 23 bp, Homo sapiens
tccctctcccaacctacgtaggg

SEQ ID NO: 7243 - DNA, 23 bp, Homo sapiens
tccctctcccaacctatgtaggg

SEQ ID NO: 7244 - DNA, 23 bp, Homo sapiens
tccctctgccaacctatgtaggg

SEQ ID NO: 7245 - DNA, 23 bp, Homo sapiens
tccctctgctcctgagggagagg

SEQ ID NO: 7246 - DNA, 23 bp, Homo sapiens
tccctctggtcctgagggagagg

SEQ ID NO: 7247 - DNA, 23 bp, Homo sapiens
tccgagagccttgtctgcattgg

SEQ ID NO: 7248 - DNA, 23 bp, Homo sapiens
tccgagggccgcgtctgcaatgg

SEQ ID NO: 7249 - DNA, 23 bp, Homo sapiens
tccgagggccgcgtctgcattgg

SEQ ID NO: 7250 - DNA, 23 bp, Homo sapiens
tccgagtccgggtgggtgactgg

SEQ ID NO: 7251 - DNA, 23 bp, Homo sapiens
tccgcagacacctggagaacggg

SEQ ID NO: 7252 - DNA, 23 bp, Homo sapiens
tccgcagatacctgaagaacggg

SEQ ID NO: 7253 - DNA, 23 bp, Homo sapiens
tccgcagatacctgaagaatggg

SEQ ID NO: 7254 - DNA, 23 bp, Homo sapiens
tccgcagatacctggagaacagg

SEQ ID NO: 7255 - DNA, 23 bp, Homo sapiens
tccgcagatacctggagaacggg

SEQ ID NO: 7256 - DNA, 23 bp, Homo sapiens
tccgcagatccaccttggggtgg

SEQ ID NO: 7257 - DNA, 23 bp, Homo sapiens
tccgcggatacctggagaacggg

SEQ ID NO: 7258 - DNA, 23 bp, Homo sapiens
tccgcggccaggccgggacacgg

SEQ ID NO: 7259 - DNA, 23 bp, Homo sapiens
tccgcggccgggccgggacacgg

SEQ ID NO: 7260 - DNA, 23 bp, Homo sapiens
tccggccccgaccaacccggggg

SEQ ID NO: 7261 - DNA, 23 bp, Homo sapiens
tccggttgtagtagccgcgcagg

SEQ ID NO: 7262 - DNA, 23 bp, Homo sapiens
tccgtgtcccggcccggcagtgg

SEQ ID NO: 7263 - DNA, 23 bp, Homo sapiens
tccgtgtcccggcccggccgcgg

SEQ ID NO: 7264 - DNA, 23 bp, Homo sapiens
tccgtgtcccggcctggccgcgg

SEQ ID NO: 7265 - DNA, 23 bp, Homo sapiens
tccgtgtcctggcccggccgcgg

SEQ ID NO: 7266 - DNA, 23 bp, Homo sapiens
tcctaaggtctgtccttagcagg

SEQ ID NO: 7267 - DNA, 23 bp, Homo sapiens
tcctccaggcgcggcttcccggg

SEQ ID NO: 7268 - DNA, 23 bp, Homo sapiens
tcctcccggcgcggctacccggg

SEQ ID NO: 7269 - DNA, 23 bp, Homo sapiens
tcctcccggcgcggctcccccgg

SEQ ID NO: 7270 - DNA, 23 bp, Homo sapiens
tcctcccggcgcggctccccggg

SEQ ID NO: 7271 - DNA, 23 bp, Homo sapiens
tcctcccggcgcggctcctcagg

SEQ ID NO: 7272 - DNA, 23 bp, Homo sapiens
tcctcccggcgcggcttcccggg

SEQ ID NO: 7273 - DNA, 23 bp, Homo sapiens
tcctccctgcgcggctccccggg

SEQ ID NO: 7274 - DNA, 23 bp, Homo sapiens
tcctcgtggaaggccatcccggg

SEQ ID NO: 7275 - DNA, 23 bp, Homo sapiens
tcctcgtgggaggccatcccggg

SEQ ID NO: 7276 - DNA, 23 bp, Homo sapiens
tcctcgtgggaggccatgccggg

SEQ ID NO: 7277 - DNA, 23 bp, Homo sapiens
tcctctagccacatcttctgtgg

SEQ ID NO: 7278 - DNA, 23 bp, Homo sapiens
tcctctagccacatgttctgtgg

SEQ ID NO: 7279 - DNA, 23 bp, Homo sapiens
tcctctccctcaggaccagaggg

SEQ ID NO: 7280 - DNA, 23 bp, Homo sapiens
tcctctccctcaggagcagaggg

SEQ ID NO: 7281 - DNA, 23 bp, Homo sapiens
tcctgacctgcgcccccggccgg

SEQ ID NO: 7282 - DNA, 23 bp, Homo sapiens
tcctggccctgaccgagacctgg

SEQ ID NO: 7283 - DNA, 23 bp, Homo sapiens
tcctggcgggggcgcaggaccgg

SEQ ID NO: 7284 - DNA, 23 bp, Homo sapiens
tcctgtcccacgtctcctgaggg

SEQ ID NO: 7285 - DNA, 23 bp, Homo sapiens
tcctgtcccacgtctcctgcggg

SEQ ID NO: 7286 - DNA, 23 bp, Homo sapiens
tcctgtcccacgtctcctgtggg

SEQ ID NO: 7287 - DNA, 23 bp, Homo sapiens
tcctgttctccaggtatctgcgg

SEQ ID NO: 7288 - DNA, 23 bp, Homo sapiens
tcctgttttggttctactccagg

SEQ ID NO: 7289 - DNA, 23 bp, Homo sapiens
tcctgtttttgttctactccagg

SEQ ID NO: 7290 - DNA, 23 bp, Homo sapiens
tccttctggagcccttcagccgg

SEQ ID NO: 7291 - DNA, 23 bp, Homo sapiens
tccttgtgggaggccagcccggg

SEQ ID NO: 7292 - DNA, 23 bp, Homo sapiens
tcgacagcgacgccgcgagccgg

SEQ ID NO: 7293 - DNA, 23 bp, Homo sapiens
tcgccctccctctggtcctgagg

SEQ ID NO: 7294 - DNA, 23 bp, Homo sapiens
tcgccggtcgagggtctgggcgg

SEQ ID NO: 7295 - DNA, 23 bp, Homo sapiens
tcgccggtcgagggtttgggcgg

SEQ ID NO: 7296 - DNA, 23 bp, Homo sapiens
tcgcgggacggggctgaccacgg

SEQ ID NO: 7297 - DNA, 23 bp, Homo sapiens
tcgctactgtgatgtgtaggagg

SEQ ID NO: 7298 - DNA, 23 bp, Homo sapiens
tcgctcggtcagtctgtgactgg

SEQ ID NO: 7299 - DNA, 23 bp, Homo sapiens
tcgctcggtcagtctgtgagtgg

SEQ ID NO: 7300 - DNA, 23 bp, Homo sapiens
tcgctcggttagtctgtgagtgg

SEQ ID NO: 7301 - DNA, 23 bp, Homo sapiens
tcgctgccgtgatgtggaggagg

SEQ ID NO: 7302 - DNA, 23 bp, Homo sapiens
tcgctgctgtgaggtggaggagg

SEQ ID NO: 7303 - DNA, 23 bp, Homo sapiens
tcgctgctgtgatacataggagg

SEQ ID NO: 7304 - DNA, 23 bp, Homo sapiens
tcgctgctgtgatgtggaggagg

SEQ ID NO: 7305 - DNA, 23 bp, Homo sapiens
tcgctgctgtgatgtgtaggagg

SEQ ID NO: 7306 - DNA, 23 bp, Homo sapiens
tcgctgctgtggtgtgtaggagg

SEQ ID NO: 7307 - DNA, 23 bp, Homo sapiens
tcggacgggcgcttcctccgcgg

SEQ ID NO: 7308 - DNA, 23 bp, Homo sapiens
tcggactggcgcttcctccgcgg

SEQ ID NO: 7309 - DNA, 23 bp, Homo sapiens
tcggactggcgcttcctgcgcgg

SEQ ID NO: 7310 - DNA, 23 bp, Homo sapiens
tcgggacctgcgccccgggccgg

SEQ ID NO: 7311 - DNA, 23 bp, Homo sapiens
tcgggactggggcggggctcggg

SEQ ID NO: 7312 - DNA, 23 bp, Homo sapiens
tcggggccggacggggctcgggg

SEQ ID NO: 7313 - DNA, 23 bp, Homo sapiens
tcggggccgggcagggcttgggg

SEQ ID NO: 7314 - DNA, 23 bp, Homo sapiens
tcggggccgggcggggctcgggg

SEQ ID NO: 7315 - DNA, 23 bp, Homo sapiens
tcggggcggggcggggctcgggg

SEQ ID NO: 7316 - DNA, 23 bp, Homo sapiens
tcggggctgggcggggctcgggg

SEQ ID NO: 7317 - DNA, 23 bp, Homo sapiens
tcggggctggggcggggctcggg

SEQ ID NO: 7318 - DNA, 23 bp, Homo sapiens
tcgggggaccgggctgaccacgg

SEQ ID NO: 7319 - DNA, 23 bp, Homo sapiens
tcgggggaccgggctgaccgcgg

SEQ ID NO: 7320 - DNA, 23 bp, Homo sapiens
tcgggggaccgggctgacctcgg

SEQ ID NO: 7321 - DNA, 23 bp, Homo sapiens
tcgggggacgggctgaccacggg

SEQ ID NO: 7322 - DNA, 23 bp, Homo sapiens
tcgggggacggggctgaccacgg

SEQ ID NO: 7323 - DNA, 23 bp, Homo sapiens
tcgggggacggggctgaccgcgg

SEQ ID NO: 7324 - DNA, 23 bp, Homo sapiens
tcgggggacggtgctgaccgcgg

SEQ ID NO: 7325 - DNA, 23 bp, Homo sapiens
tcgggggactgggctgaccgcgg

SEQ ID NO: 7326 - DNA, 23 bp, Homo sapiens
tcgggggactgggctgaccgtgg

SEQ ID NO: 7327 - DNA, 23 bp, Homo sapiens
tcgggggcggatctcggacccgg

SEQ ID NO: 7328 - DNA, 23 bp, Homo sapiens
tcgtcccggcgcggctcccccgg

SEQ ID NO: 7329 - DNA, 23 bp, Homo sapiens
tcgtgacctgcgccccaggccgg

SEQ ID NO: 7330 - DNA, 23 bp, Homo sapiens
tcgtgacctgcgcccccggccgg

SEQ ID NO: 7331 - DNA, 23 bp, Homo sapiens
tcgtgacctgcgcccccgggcgg

SEQ ID NO: 7332 - DNA, 23 bp, Homo sapiens
tcgtgacctgcgccccgggccgg

SEQ ID NO: 7333 - DNA, 23 bp, Homo sapiens
tcgtgacctgcgccccgggctgg

SEQ ID NO: 7334 - DNA, 23 bp, Homo sapiens
tcgtggagaccaggcctgcaggg

SEQ ID NO: 7335 - DNA, 23 bp, Homo sapiens
tcgtggggaaaccgcctctgcgg

SEQ ID NO: 7336 - DNA, 23 bp, Homo sapiens
tctagaacccgacacccaatggg

SEQ ID NO: 7337 - DNA, 23 bp, Homo sapiens
tctagaatccgacacccaatggg

SEQ ID NO: 7338 - DNA, 23 bp, Homo sapiens
tctagacacccgacacccaatgg

SEQ ID NO: 7339 - DNA, 23 bp, Homo sapiens
tctagagtgggcgggggggcggg

SEQ ID NO: 7340 - DNA, 23 bp, Homo sapiens
tctagagtgggcggggggggcgg

SEQ ID NO: 7341 - DNA, 23 bp, Homo sapiens
tctagagtgggcggggggggtgg

SEQ ID NO: 7342 - DNA, 23 bp, Homo sapiens
tctagagtgggtgggggtggcgg

SEQ ID NO: 7343 - DNA, 23 bp, Homo sapiens
tctagagtgggtggggtggcagg

SEQ ID NO: 7344 - DNA, 23 bp, Homo sapiens
tctagagtgggtggggtggcggg

SEQ ID NO: 7345 - DNA, 23 bp, Homo sapiens
tctagatatccaatacccaatgg

SEQ ID NO: 7346 - DNA, 23 bp, Homo sapiens
tctagatatccgacacccaatgg

SEQ ID NO: 7347 - DNA, 23 bp, Homo sapiens
tctcaactgctccgccacacggg

SEQ ID NO: 7348 - DNA, 23 bp, Homo sapiens
tctcaactgctccgccacatggg

SEQ ID NO: 7349 - DNA, 23 bp, Homo sapiens
tctcaactgctccgcccaacggg

SEQ ID NO: 7350 - DNA, 23 bp, Homo sapiens
tctcaactgctccgcccgacggg

SEQ ID NO: 7351 - DNA, 23 bp, Homo sapiens
tctcaactgctccgcctcatggg

SEQ ID NO: 7352 - DNA, 23 bp, Homo sapiens
tctcacctttacaagctgtgagg

SEQ ID NO: 7353 - DNA, 23 bp, Homo sapiens
tctcactcccattgggtgtcggg

SEQ ID NO: 7354 - DNA, 23 bp, Homo sapiens
tctcagcccctccttgccccagg

SEQ ID NO: 7355 - DNA, 23 bp, Homo sapiens
tctcagcctccactcaggtcagg

SEQ ID NO: 7356 - DNA, 23 bp, Homo sapiens
tctcagctgctccgccacacggg

SEQ ID NO: 7357 - DNA, 23 bp, Homo sapiens
tctcagctgctccgcccgacggg

SEQ ID NO: 7358 - DNA, 23 bp, Homo sapiens
tctcagctgctccgccgcacggg

SEQ ID NO: 7359 - DNA, 23 bp, Homo sapiens
tctcagctgctccgccgtacggg

SEQ ID NO: 7360 - DNA, 23 bp, Homo sapiens
tctcagctgctccgcctcacggg

SEQ ID NO: 7361 - DNA, 23 bp, Homo sapiens
tctcaggctggtcacatgggtgg

SEQ ID NO: 7362 - DNA, 23 bp, Homo sapiens
tctcagggtctcaggctccaagg

SEQ ID NO: 7363 - DNA, 23 bp, Homo sapiens
tctcagggtctcaggctccgagg

SEQ ID NO: 7364 - DNA, 23 bp, Homo sapiens
tctccacaagctccgtgtcctgg

SEQ ID NO: 7365 - DNA, 23 bp, Homo sapiens
tctccacaagctcggtgtcctgg

SEQ ID NO: 7366 - DNA, 23 bp, Homo sapiens
tctccacgagctccgtgtcctgg

SEQ ID NO: 7367 - DNA, 23 bp, Homo sapiens
tctccactgctccgccacatggg

SEQ ID NO: 7368 - DNA, 23 bp, Homo sapiens
tctccactgctccgccgcacggg

SEQ ID NO: 7369 - DNA, 23 bp, Homo sapiens
tctccactgctccgcctcacggg

SEQ ID NO: 7370 - DNA, 23 bp, Homo sapiens
tctccactgctccgcctcatggg

SEQ ID NO: 7371 - DNA, 23 bp, Homo sapiens
tctccccagacgccgagatgcgg

SEQ ID NO: 7372 - DNA, 23 bp, Homo sapiens
tctccccagaggccgagatgcgg

SEQ ID NO: 7373 - DNA, 23 bp, Homo sapiens
tctccccagggtagaagcccagg

SEQ ID NO: 7374 - DNA, 23 bp, Homo sapiens
tctcccggggcaagggtctcggg

SEQ ID NO: 7375 - DNA, 23 bp, Homo sapiens
tctcccgggtcaagggtctcggg

SEQ ID NO: 7376 - DNA, 23 bp, Homo sapiens
tctccctcaggaccagagggagg

SEQ ID NO: 7377 - DNA, 23 bp, Homo sapiens
tctccctcaggagcagagggagg

SEQ ID NO: 7378 - DNA, 23 bp, Homo sapiens
tctccgcagggtagaaacccagg

SEQ ID NO: 7379 - DNA, 23 bp, Homo sapiens
tctccgcagggtagaagcccagg

SEQ ID NO: 7380 - DNA, 23 bp, Homo sapiens
tctccgcagggtagaagctcagg

SEQ ID NO: 7381 - DNA, 23 bp, Homo sapiens
tctccgctgctccgccacacggg

SEQ ID NO: 7382 - DNA, 23 bp, Homo sapiens
tctccgctgctccgcctcacggg

SEQ ID NO: 7383 - DNA, 23 bp, Homo sapiens
tctccggccgagggtctgggcgg

SEQ ID NO: 7384 - DNA, 23 bp, Homo sapiens
tctccggtcgagggtctgggcgg

SEQ ID NO: 7385 - DNA, 23 bp, Homo sapiens
tctccgtagggtagaagcccagg

SEQ ID NO: 7386 - DNA, 23 bp, Homo sapiens
tctcctcagacaccgagatgcgg

SEQ ID NO: 7387 - DNA, 23 bp, Homo sapiens
tctcctcagacgccgagatgcgg

SEQ ID NO: 7388 - DNA, 23 bp, Homo sapiens
tctcggagtcccgcggcttcggg

SEQ ID NO: 7389 - DNA, 23 bp, Homo sapiens
tctcggggtcccgcggcttcggg

SEQ ID NO: 7390 - DNA, 23 bp, Homo sapiens
tctctccacctcctcacattagg

SEQ ID NO: 7391 - DNA, 23 bp, Homo sapiens
tctctcggtcagtctgtgactgg

SEQ ID NO: 7392 - DNA, 23 bp, Homo sapiens
tctctcggtcagtctgtgagtgg

SEQ ID NO: 7393 - DNA, 23 bp, Homo sapiens
tctctcggtcagtctgtgcctgg

SEQ ID NO: 7394 - DNA, 23 bp, Homo sapiens
tctctgcagggtagaagcccagg

SEQ ID NO: 7395 - DNA, 23 bp, Homo sapiens
tctctgctgctccgccacatggg

SEQ ID NO: 7396 - DNA, 23 bp, Homo sapiens
tctctgctgctccgccgcacggg

SEQ ID NO: 7397 - DNA, 23 bp, Homo sapiens
tctctgctgctccgccgcatggg

SEQ ID NO: 7398 - DNA, 23 bp, Homo sapiens
tctctgggtctcaagctcccagg

SEQ ID NO: 7399 - DNA, 23 bp, Homo sapiens
tctgacctttagcagggtcaggg

SEQ ID NO: 7400 - DNA, 23 bp, Homo sapiens
tctgaggagactctgagtccggg

SEQ ID NO: 7401 - DNA, 23 bp, Homo sapiens
tctgaggagattctgagtccggg

SEQ ID NO: 7402 - DNA, 23 bp, Homo sapiens
tctgaggagattttgagtccggg

SEQ ID NO: 7403 - DNA, 23 bp, Homo sapiens
tctgagtccgggtgggtgactgg

SEQ ID NO: 7404 - DNA, 23 bp, Homo sapiens
tctgagtccgggtgggtgcgtgg

SEQ ID NO: 7405 - DNA, 23 bp, Homo sapiens
tctgagttttcttgtcccactgg

SEQ ID NO: 7406 - DNA, 23 bp, Homo sapiens
tctgcaacaggaaagatgattgg

SEQ ID NO: 7407 - DNA, 23 bp, Homo sapiens
tctgccgccttccccaccccagg

SEQ ID NO: 7408 - DNA, 23 bp, Homo sapiens
tctgcgctcctggaccgccgcgg

SEQ ID NO: 7409 - DNA, 23 bp, Homo sapiens
tctgctcccgatctgagtggagg

SEQ ID NO: 7410 - DNA, 23 bp, Homo sapiens
tctgctcctgatctaagtggagg

SEQ ID NO: 7411 - DNA, 23 bp, Homo sapiens
tctgctcctgatctgagtggagg

SEQ ID NO: 7412 - DNA, 23 bp, Homo sapiens
tctgctctctaggacaattaagg

SEQ ID NO: 7413 - DNA, 23 bp, Homo sapiens
tctggaaacccgacacccaatgg

SEQ ID NO: 7414 - DNA, 23 bp, Homo sapiens
tctggaacaggaaagatgattgg

SEQ ID NO: 7415 - DNA, 23 bp, Homo sapiens
tctggcatctctttctacaaagg

SEQ ID NO: 7416 - DNA, 23 bp, Homo sapiens
tctggcatctctttctgcaaagg

SEQ ID NO: 7417 - DNA, 23 bp, Homo sapiens
tctggccctgacccagacctggg

SEQ ID NO: 7418 - DNA, 23 bp, Homo sapiens
tctgggagctgaagtggtcgggg

SEQ ID NO: 7419 - DNA, 23 bp, Homo sapiens
tctggggagaatccgagtccggg

SEQ ID NO: 7420 - DNA, 23 bp, Homo sapiens
tctggggagaatctgagtcccgg

SEQ ID NO: 7421 - DNA, 23 bp, Homo sapiens
tctggggagaatctgagtccggg

SEQ ID NO: 7422 - DNA, 23 bp, Homo sapiens
tctggggagaatgtgagtccggg

SEQ ID NO: 7423 - DNA, 23 bp, Homo sapiens
tctggggagctgaagtggtcggg

SEQ ID NO: 7424 - DNA, 23 bp, Homo sapiens
tctggggagctgaagtggtctgg

SEQ ID NO: 7425 - DNA, 23 bp, Homo sapiens
tctggggcggggtggggcagagg

SEQ ID NO: 7426 - DNA, 23 bp, Homo sapiens
tctgggggtgggtggggcagagg

SEQ ID NO: 7427 - DNA, 23 bp, Homo sapiens
tctgggggtgggtggggcagtgg

SEQ ID NO: 7428 - DNA, 23 bp, Homo sapiens
tctgggttttcttgtcccactgg

SEQ ID NO: 7429 - DNA, 23 bp, Homo sapiens
tctgggttttcttgttccactgg

SEQ ID NO: 7430 - DNA, 23 bp, Homo sapiens
tctggtcctgacctgagtggagg

SEQ ID NO: 7431 - DNA, 23 bp, Homo sapiens
tctggttgtagtagccgcgcagg

SEQ ID NO: 7432 - DNA, 23 bp, Homo sapiens
tctggttgtagtagcggagcagg

SEQ ID NO: 7433 - DNA, 23 bp, Homo sapiens
tctggttgtagtagctgcgcagg

SEQ ID NO: 7434 - DNA, 23 bp, Homo sapiens
tctgtcctgctccgccacacggg

SEQ ID NO: 7435 - DNA, 23 bp, Homo sapiens
tctgtcctgctccgccgcacggg

SEQ ID NO: 7436 - DNA, 23 bp, Homo sapiens
tcttcaagtcacaaagggaaggg

SEQ ID NO: 7437 - DNA, 23 bp, Homo sapiens
tcttcccctccatttcctcaagg

SEQ ID NO: 7438 - DNA, 23 bp, Homo sapiens
tcttcccctccatttcctcaggg

SEQ ID NO: 7439 - DNA, 23 bp, Homo sapiens
tcttcctgacagacccccccagg

SEQ ID NO: 7440 - DNA, 23 bp, Homo sapiens
tcttctctctagacaattaaggg

SEQ ID NO: 7441 - DNA, 23 bp, Homo sapiens
tcttctctctaggacaattaagg

SEQ ID NO: 7442 - DNA, 23 bp, Homo sapiens
tcttgaagatctgtgtgttccgg

SEQ ID NO: 7443 - DNA, 23 bp, Homo sapiens
tcttgcagatctgtgtgttccgg

SEQ ID NO: 7444 - DNA, 23 bp, Homo sapiens
tcttggagatctgtgtctcccgg

SEQ ID NO: 7445 - DNA, 23 bp, Homo sapiens
tcttggagatctgtgtgttccgg

SEQ ID NO: 7446 - DNA, 23 bp, Homo sapiens
tcttggggtctagagtgggcggg

SEQ ID NO: 7447 - DNA, 23 bp, Homo sapiens
tcttggggtctagagtgggtggg

SEQ ID NO: 7448 - DNA, 23 bp, Homo sapiens
tcttgtagatctgtgtgttccgg

SEQ ID NO: 7449 - DNA, 23 bp, Homo sapiens
tcttgtcccacatctcctgcggg

SEQ ID NO: 7450 - DNA, 23 bp, Homo sapiens
tcttgtcccacatctcctgtggg

SEQ ID NO: 7451 - DNA, 23 bp, Homo sapiens
tctttcctgttccagagaggtgg

SEQ ID NO: 7452 - DNA, 23 bp, Homo sapiens
tctttcctgttgcagagaggtgg

SEQ ID NO: 7453 - DNA, 23 bp, Homo sapiens
tgaaaccggctaaaggcgcctgg

SEQ ID NO: 7454 - DNA, 23 bp, Homo sapiens
tgaaaccgggtaaacgcgcctgg

SEQ ID NO: 7455 - DNA, 23 bp, Homo sapiens
tgaaaccgggtaaaggcgactgg

SEQ ID NO: 7456 - DNA, 23 bp, Homo sapiens
tgaaaccgggtaaaggcgcctgg

SEQ ID NO: 7457 - DNA, 23 bp, Homo sapiens
tgaaaccgggtaaaggtgactgg

SEQ ID NO: 7458 - DNA, 23 bp, Homo sapiens
tgaaaccgggttaaggcgcctgg

SEQ ID NO: 7459 - DNA, 23 bp, Homo sapiens
tgaaagaggacctgcgctcttgg

SEQ ID NO: 7460 - DNA, 23 bp, Homo sapiens
tgaacgaggacctgagctcctgg

SEQ ID NO: 7461 - DNA, 23 bp, Homo sapiens
tgaacgaggacctgcgctcctgg

SEQ ID NO: 7462 - DNA, 23 bp, Homo sapiens
tgaacgaggacctgcgctcttgg

SEQ ID NO: 7463 - DNA, 23 bp, Homo sapiens
tgaacgaggatctgcgctcctgg

SEQ ID NO: 7464 - DNA, 23 bp, Homo sapiens
tgaagaaatacctcatggagtgg

SEQ ID NO: 7465 - DNA, 23 bp, Homo sapiens
tgaagaaatacttcatggagtgg

SEQ ID NO: 7466 - DNA, 23 bp, Homo sapiens
tgaagcacatgtgacaatgaagg

SEQ ID NO: 7467 - DNA, 23 bp, Homo sapiens
tgaagccaccctgaggtgctggg

SEQ ID NO: 7468 - DNA, 23 bp, Homo sapiens
tgaaggaccctacgtaggttggg

SEQ ID NO: 7469 - DNA, 23 bp, Homo sapiens
tgaagtccctgaggaaatggagg

SEQ ID NO: 7470 - DNA, 23 bp, Homo sapiens
tgaagtccttgaggaaatggagg

SEQ ID NO: 7471 - DNA, 23 bp, Homo sapiens
tgaagtctctgaggaaatggagg

SEQ ID NO: 7472 - DNA, 23 bp, Homo sapiens
tgaatgaggacctgcgctcctgg

SEQ ID NO: 7473 - DNA, 23 bp, Homo sapiens
tgaccaacccgcggggattttgg

SEQ ID NO: 7474 - DNA, 23 bp, Homo sapiens
tgaccacgggggcggggccaggg

SEQ ID NO: 7475 - DNA, 23 bp, Homo sapiens
tgaccagcctgagaatggacagg

SEQ ID NO: 7476 - DNA, 23 bp, Homo sapiens
tgaccagcctgagaatggacggg

SEQ ID NO: 7477 - DNA, 23 bp, Homo sapiens
tgaccagcctgagaatgggcagg

SEQ ID NO: 7478 - DNA, 23 bp, Homo sapiens
tgaccatcctgagaacggacagg

SEQ ID NO: 7479 - DNA, 23 bp, Homo sapiens
tgaccatcctgagaatggacagg

SEQ ID NO: 7480 - DNA, 23 bp, Homo sapiens
tgacccagctgaagggctccagg

SEQ ID NO: 7481 - DNA, 23 bp, Homo sapiens
tgacccgcatctcggcctctggg

SEQ ID NO: 7482 - DNA, 23 bp, Homo sapiens
tgacccgcatctcggcgtctggg

SEQ ID NO: 7483 - DNA, 23 bp, Homo sapiens
tgacccggctgaagggctccagg

SEQ ID NO: 7484 - DNA, 23 bp, Homo sapiens
tgaccgcggggccggggccaggg

SEQ ID NO: 7485 - DNA, 23 bp, Homo sapiens
tgaccgcggggcctgggccaggg

SEQ ID NO: 7486 - DNA, 23 bp, Homo sapiens
tgaccgcgggggcggggccaggg

SEQ ID NO: 7487 - DNA, 23 bp, Homo sapiens
tgacctcatggtcagagatgggg

SEQ ID NO: 7488 - DNA, 23 bp, Homo sapiens
tgacctggctgaagggctccagg

SEQ ID NO: 7489 - DNA, 23 bp, Homo sapiens
tgacggccatcctcggcgtctgg

SEQ ID NO: 7490 - DNA, 23 bp, Homo sapiens
tgacggccatcctcggggtctgg

SEQ ID NO: 7491 - DNA, 23 bp, Homo sapiens
tgacgtctctgaggaaatggagg

SEQ ID NO: 7492 - DNA, 23 bp, Homo sapiens
tgacgtctctgaggaaatgtagg

SEQ ID NO: 7493 - DNA, 23 bp, Homo sapiens
tgactatcctgagaatggacagg

SEQ ID NO: 7494 - DNA, 23 bp, Homo sapiens
tgactggggacttcagaaccggg

SEQ ID NO: 7495 - DNA, 23 bp, Homo sapiens
tgactggggactttagaaccggg

SEQ ID NO: 7496 - DNA, 23 bp, Homo sapiens
tgactggttccctttgacaccgg

SEQ ID NO: 7497 - DNA, 23 bp, Homo sapiens
tgagaaccccgcccgggacctgg

SEQ ID NO: 7498 - DNA, 23 bp, Homo sapiens
tgagaacggacaggacacctggg

SEQ ID NO: 7499 - DNA, 23 bp, Homo sapiens
tgagaatggacaggacacccggg

SEQ ID NO: 7500 - DNA, 23 bp, Homo sapiens
tgagaatggacaggacacctggg

SEQ ID NO: 7501 - DNA, 23 bp, Homo sapiens
tgagaatggacgggacacctggg

SEQ ID NO: 7502 - DNA, 23 bp, Homo sapiens
tgagaatgggcaggacacctggg

SEQ ID NO: 7503 - DNA, 23 bp, Homo sapiens
tgagagacacatcagagccctgg

SEQ ID NO: 7504 - DNA, 23 bp, Homo sapiens
tgagagacatatcagagccctgg

SEQ ID NO: 7505 - DNA, 23 bp, Homo sapiens
tgagagactcatcagagccctgg

SEQ ID NO: 7506 - DNA, 23 bp, Homo sapiens
tgagagccccgcccgggacctgg

SEQ ID NO: 7507 - DNA, 23 bp, Homo sapiens
tgagagccccgcccggggcctgg

SEQ ID NO: 7508 - DNA, 23 bp, Homo sapiens
tgagagccccgtccgggacatgg

SEQ ID NO: 7509 - DNA, 23 bp, Homo sapiens
tgagagccccgtccgggacctgg

SEQ ID NO: 7510 - DNA, 23 bp, Homo sapiens
tgagataccagaaaggagccagg

SEQ ID NO: 7511 - DNA, 23 bp, Homo sapiens
tgagataccagaaaggagtcagg

SEQ ID NO: 7512 - DNA, 23 bp, Homo sapiens
tgagatccaccccgaggctgcgg

SEQ ID NO: 7513 - DNA, 23 bp, Homo sapiens
tgagatcctccccgaggctgcgg

SEQ ID NO: 7514 - DNA, 23 bp, Homo sapiens
tgagattctgggagctgaagtgg

SEQ ID NO: 7515 - DNA, 23 bp, Homo sapiens
tgagatttcttgtctcactgagg

SEQ ID NO: 7516 - DNA, 23 bp, Homo sapiens
tgagcatgaggcagagaacaagg

SEQ ID NO: 7517 - DNA, 23 bp, Homo sapiens
tgagcgtcaggcagagaacaagg

SEQ ID NO: 7518 - DNA, 23 bp, Homo sapiens
tgagcgtgaggcagagaacaagg

SEQ ID NO: 7519 - DNA, 23 bp, Homo sapiens
tgagctaccagaaaggagccagg

SEQ ID NO: 7520 - DNA, 23 bp, Homo sapiens
tgaggagccgcgccgggaggagg

SEQ ID NO: 7521 - DNA, 23 bp, Homo sapiens
tgaggatggacaggacacctggg

SEQ ID NO: 7522 - DNA, 23 bp, Homo sapiens
tgaggccaccctgaggtgctggg

SEQ ID NO: 7523 - DNA, 23 bp, Homo sapiens
tgaggccactctgagatgctggg

SEQ ID NO: 7524 - DNA, 23 bp, Homo sapiens
tgaggccactctgaggtgctggg

SEQ ID NO: 7525 - DNA, 23 bp, Homo sapiens
tgagggacacatcagagccctgg

SEQ ID NO: 7526 - DNA, 23 bp, Homo sapiens
tgagggagaggaatcctcctggg

SEQ ID NO: 7527 - DNA, 23 bp, Homo sapiens
tgagggcactgggaggaagcagg

SEQ ID NO: 7528 - DNA, 23 bp, Homo sapiens
tgaggggacagggaggaggcagg

SEQ ID NO: 7529 - DNA, 23 bp, Homo sapiens
tgaggggacagggaggagtcagg

SEQ ID NO: 7530 - DNA, 23 bp, Homo sapiens
tgaggggactgggaggaagcagg

SEQ ID NO: 7531 - DNA, 23 bp, Homo sapiens
tgaggggactgggaggaggcagg

SEQ ID NO: 7532 - DNA, 23 bp, Homo sapiens
tgaggtcaccctgaggtgctggg

SEQ ID NO: 7533 - DNA, 23 bp, Homo sapiens
tgagtcatatgcgtcctgggggg

SEQ ID NO: 7534 - DNA, 23 bp, Homo sapiens
tgagtcatatgcgtcttgggggg

SEQ ID NO: 7535 - DNA, 23 bp, Homo sapiens
tgagtcccggtgggtgcgtgcgg

SEQ ID NO: 7536 - DNA, 23 bp, Homo sapiens
tgagtccgggtgggtgactgggg

SEQ ID NO: 7537 - DNA, 23 bp, Homo sapiens
tgagtccgggtgggtgcgtgggg

SEQ ID NO: 7538 - DNA, 23 bp, Homo sapiens
tgagtggttccctttgacaccgg

SEQ ID NO: 7539 - DNA, 23 bp, Homo sapiens
tgagtgtgaagcagagaacaagg

SEQ ID NO: 7540 - DNA, 23 bp, Homo sapiens
tgagtgtgaggcagagaacaagg

SEQ ID NO: 7541 - DNA, 23 bp, Homo sapiens
tgagttttcttgtcccactgggg

SEQ ID NO: 7542 - DNA, 23 bp, Homo sapiens
tgatcgcctatagatctcccggg

SEQ ID NO: 7543 - DNA, 23 bp, Homo sapiens
tgatcgcctgtagatctcccggg

SEQ ID NO: 7544 - DNA, 23 bp, Homo sapiens
tgatcgcctgtaggtctcccggg

SEQ ID NO: 7545 - DNA, 23 bp, Homo sapiens
tgatgaagcggggctccccgcgg

SEQ ID NO: 7546 - DNA, 23 bp, Homo sapiens
tgatggcagtgggcgtgtggagg

SEQ ID NO: 7547 - DNA, 23 bp, Homo sapiens
tgatggcggcaggcgtgtggagg

SEQ ID NO: 7548 - DNA, 23 bp, Homo sapiens
tgatggcggcgggcgtgtggagg

SEQ ID NO: 7549 - DNA, 23 bp, Homo sapiens
tgatggcggtgggcgtgtggagg

SEQ ID NO: 7550 - DNA, 23 bp, Homo sapiens
tgatggctgttgtgatgtgtagg

SEQ ID NO: 7551 - DNA, 23 bp, Homo sapiens
tgatgggggcgggagtgtgaagg

SEQ ID NO: 7552 - DNA, 23 bp, Homo sapiens
tgatgggggcgggagtgtggagg

SEQ ID NO: 7553 - DNA, 23 bp, Homo sapiens
tgatgggggtgggagtgtggagg

SEQ ID NO: 7554 - DNA, 23 bp, Homo sapiens
tgatgtatggctgccacgtgggg

SEQ ID NO: 7555 - DNA, 23 bp, Homo sapiens
tgatgtatggctgcgacgtgggg

SEQ ID NO: 7556 - DNA, 23 bp, Homo sapiens
tgatgtgtgttgggtgttggggg

SEQ ID NO: 7557 - DNA, 23 bp, Homo sapiens
tgatgtttggctgcgacgtgggg

SEQ ID NO: 7558 - DNA, 23 bp, Homo sapiens
tgcaacaggaaagatgattgggg

SEQ ID NO: 7559 - DNA, 23 bp, Homo sapiens
tgcagacccagggcaggatcagg

SEQ ID NO: 7560 - DNA, 23 bp, Homo sapiens
tgcagacccagggcgggatcagg

SEQ ID NO: 7561 - DNA, 23 bp, Homo sapiens
tgcagcacatgtgacaatgaagg

SEQ ID NO: 7562 - DNA, 23 bp, Homo sapiens
tgcagggaacacttctacctggg

SEQ ID NO: 7563 - DNA, 23 bp, Homo sapiens
tgcatcccagtaatgaggcaggg

SEQ ID NO: 7564 - DNA, 23 bp, Homo sapiens
tgccatgtccgccgcggtccagg

SEQ ID NO: 7565 - DNA, 23 bp, Homo sapiens
tgccattctccattcaacggagg

SEQ ID NO: 7566 - DNA, 23 bp, Homo sapiens
tgccattctccattcaagggagg

SEQ ID NO: 7567 - DNA, 23 bp, Homo sapiens
tgcccgcccggcgagggcgcagg

SEQ ID NO: 7568 - DNA, 23 bp, Homo sapiens
tgcccggccccgaccaacccggg

SEQ ID NO: 7569 - DNA, 23 bp, Homo sapiens
tgccctatgaggggactgggagg

SEQ ID NO: 7570 - DNA, 23 bp, Homo sapiens
tgccctgtgaggggacagggagg

SEQ ID NO: 7571 - DNA, 23 bp, Homo sapiens
tgccctgtgaggggactgggagg

SEQ ID NO: 7572 - DNA, 23 bp, Homo sapiens
tgccgccggtgtgtgtcaaaggg

SEQ ID NO: 7573 - DNA, 23 bp, Homo sapiens
tgccgtcgtaagcgtcctgccgg

SEQ ID NO: 7574 - DNA, 23 bp, Homo sapiens
tgccgtcgtaagcgtcctgctgg

SEQ ID NO: 7575 - DNA, 23 bp, Homo sapiens
tgccgtcgtaggcgtcctgctgg

SEQ ID NO: 7576 - DNA, 23 bp, Homo sapiens
tgccgtcgtaggcgtcctggtgg

SEQ ID NO: 7577 - DNA, 23 bp, Homo sapiens
tgcctcacactcagtgtgtttgg

SEQ ID NO: 7578 - DNA, 23 bp, Homo sapiens
tgcctgcatccgctggtgtctgg

SEQ ID NO: 7579 - DNA, 23 bp, Homo sapiens
tgcctgtgtccaggctggtctgg

SEQ ID NO: 7580 - DNA, 23 bp, Homo sapiens
tgcggagccactccacgcacagg

SEQ ID NO: 7581 - DNA, 23 bp, Homo sapiens
tgcggagccactccacgcaccgg

SEQ ID NO: 7582 - DNA, 23 bp, Homo sapiens
tgcggagcccgtccacgcaccgg

SEQ ID NO: 7583 - DNA, 23 bp, Homo sapiens
tgcggagcgactccacgcacagg

SEQ ID NO: 7584 - DNA, 23 bp, Homo sapiens
tgcggtcccctcgctcctcccgg

SEQ ID NO: 7585 - DNA, 23 bp, Homo sapiens
tgcgtggggactttagaactggg

SEQ ID NO: 7586 - DNA, 23 bp, Homo sapiens
tgcgtgtaagtgatggcagtggg

SEQ ID NO: 7587 - DNA, 23 bp, Homo sapiens
tgcgtgtaagtgatggcggcagg

SEQ ID NO: 7588 - DNA, 23 bp, Homo sapiens
tgcgtgtaagtgatggcggcggg

SEQ ID NO: 7589 - DNA, 23 bp, Homo sapiens
tgcgtgtaagtgatggcggtggg

SEQ ID NO: 7590 - DNA, 23 bp, Homo sapiens
tgcgtgtaagtgatgggggcggg

SEQ ID NO: 7591 - DNA, 23 bp, Homo sapiens
tgcgtgtaagtgatgggggtggg

SEQ ID NO: 7592 - DNA, 23 bp, Homo sapiens
tgcgtgtaagtggtgggggtggg

SEQ ID NO: 7593 - DNA, 23 bp, Homo sapiens
tgctaaggacagaccttaggagg

SEQ ID NO: 7594 - DNA, 23 bp, Homo sapiens
tgctccacccacggcgcccgcgg

SEQ ID NO: 7595 - DNA, 23 bp, Homo sapiens
tgctccacccacggcgcccgggg

SEQ ID NO: 7596 - DNA, 23 bp, Homo sapiens
tgctccacccacggctcccgcgg

SEQ ID NO: 7597 - DNA, 23 bp, Homo sapiens
tgctctatccacggcgcccgcgg

SEQ ID NO: 7598 - DNA, 23 bp, Homo sapiens
tgctctatccacggcgcccgggg

SEQ ID NO: 7599 - DNA, 23 bp, Homo sapiens
tgctctatccacggtgcccgcgg

SEQ ID NO: 7600 - DNA, 23 bp, Homo sapiens
tgctctatccatggcgcccaggg

SEQ ID NO: 7601 - DNA, 23 bp, Homo sapiens
tgctctatccatggcgcccgcgg

SEQ ID NO: 7602 - DNA, 23 bp, Homo sapiens
tgctctatccatggcgcccgggg

SEQ ID NO: 7603 - DNA, 23 bp, Homo sapiens
tgctgccggtgtgtgtcaaaggg

SEQ ID NO: 7604 - DNA, 23 bp, Homo sapiens
tgctgcctgtgtgtgtcaaaggg

SEQ ID NO: 7605 - DNA, 23 bp, Homo sapiens
tgcttcacactcaatatgtgtgg

SEQ ID NO: 7606 - DNA, 23 bp, Homo sapiens
tgcttcacactcaatgtgtgtgg

SEQ ID NO: 7607 - DNA, 23 bp, Homo sapiens
tgcttcccaggaatgagacaggg

SEQ ID NO: 7608 - DNA, 23 bp, Homo sapiens
tgcttcccagtaacgaggcaggg

SEQ ID NO: 7609 - DNA, 23 bp, Homo sapiens
tgcttcccagtaatgagacaggg

SEQ ID NO: 7610 - DNA, 23 bp, Homo sapiens
tgcttcccagtaatgaggcaggg

SEQ ID NO: 7611 - DNA, 23 bp, Homo sapiens
tgcttcccagtaatgatgcaggg

SEQ ID NO: 7612 - DNA, 23 bp, Homo sapiens
tggaaagttctagtctctgaggg

SEQ ID NO: 7613 - DNA, 23 bp, Homo sapiens
tggaacaggaaagatgattgggg

SEQ ID NO: 7614 - DNA, 23 bp, Homo sapiens
tggaaccttccagaagtgggcgg

SEQ ID NO: 7615 - DNA, 23 bp, Homo sapiens
tggaaccttccagaagtgggtgg

SEQ ID NO: 7616 - DNA, 23 bp, Homo sapiens
tggaagaagaagtgaaactcagg

SEQ ID NO: 7617 - DNA, 23 bp, Homo sapiens
tggaagcaccatccacacatggg

SEQ ID NO: 7618 - DNA, 23 bp, Homo sapiens
tggaagcaccatccacacctggg

SEQ ID NO: 7619 - DNA, 23 bp, Homo sapiens
tggaagcaccatccacacgtggg

SEQ ID NO: 7620 - DNA, 23 bp, Homo sapiens
tggaaggtcccatcccctgcagg

SEQ ID NO: 7621 - DNA, 23 bp, Homo sapiens
tggaaggttccatcccctgcagg

SEQ ID NO: 7622 - DNA, 23 bp, Homo sapiens
tggaaggttccatctcctgctgg

SEQ ID NO: 7623 - DNA, 23 bp, Homo sapiens
tggaaggttctatctcctgctgg

SEQ ID NO: 7624 - DNA, 23 bp, Homo sapiens
tggaaggttctgtctcctgctgg

SEQ ID NO: 7625 - DNA, 23 bp, Homo sapiens
tggacaggacacccgggatgggg

SEQ ID NO: 7626 - DNA, 23 bp, Homo sapiens
tggacaggacacctgggatgggg

SEQ ID NO: 7627 - DNA, 23 bp, Homo sapiens
tggacaggacacctggggtaggg

SEQ ID NO: 7628 - DNA, 23 bp, Homo sapiens
tggacaggacacctggggtgggg

SEQ ID NO: 7629 - DNA, 23 bp, Homo sapiens
tggacaggacacctggtgtgggg

SEQ ID NO: 7630 - DNA, 23 bp, Homo sapiens
tggaccaaccgccctcctgaagg

SEQ ID NO: 7631 - DNA, 23 bp, Homo sapiens
tggaccggtgagtgcggggttgg

SEQ ID NO: 7632 - DNA, 23 bp, Homo sapiens
tggacgacacccagttcgtgagg

SEQ ID NO: 7633 - DNA, 23 bp, Homo sapiens
tggacgacacgcagttcgcgcgg

SEQ ID NO: 7634 - DNA, 23 bp, Homo sapiens
tggacgacacgcagttcgtgagg

SEQ ID NO: 7635 - DNA, 23 bp, Homo sapiens
tggacgacacgcagttcgtgcgg

SEQ ID NO: 7636 - DNA, 23 bp, Homo sapiens
tggacgacacgctgttcgtgagg

SEQ ID NO: 7637 - DNA, 23 bp, Homo sapiens
tggacggcacccagttcgtgagg

SEQ ID NO: 7638 - DNA, 23 bp, Homo sapiens
tggacgggacacctggggtgggg

SEQ ID NO: 7639 - DNA, 23 bp, Homo sapiens
tggacggtgggctgggaagatgg

SEQ ID NO: 7640 - DNA, 23 bp, Homo sapiens
tggactacacgcagttcgtgcgg

SEQ ID NO: 7641 - DNA, 23 bp, Homo sapiens
tggactgggaagacggctctggg

SEQ ID NO: 7642 - DNA, 23 bp, Homo sapiens
tggactgggaagatggctctggg

SEQ ID NO: 7643 - DNA, 23 bp, Homo sapiens
tggagaaatacctcatggagtgg

SEQ ID NO: 7644 - DNA, 23 bp, Homo sapiens
tggagaaatacctcatggattgg

SEQ ID NO: 7645 - DNA, 23 bp, Homo sapiens
tggagaaggggtgaaaggtgggg

SEQ ID NO: 7646 - DNA, 23 bp, Homo sapiens
tggagaaggggtgaagggtgggg

SEQ ID NO: 7647 - DNA, 23 bp, Homo sapiens
tggagacctttagcagggtcagg

SEQ ID NO: 7648 - DNA, 23 bp, Homo sapiens
tggagcccttcagcagggtcagg

SEQ ID NO: 7649 - DNA, 23 bp, Homo sapiens
tggagcccttcagccaggtcagg

SEQ ID NO: 7650 - DNA, 23 bp, Homo sapiens
tggagcccttcagccgggtcagg

SEQ ID NO: 7651 - DNA, 23 bp, Homo sapiens
tggagcccttcagctgggtcagg

SEQ ID NO: 7652 - DNA, 23 bp, Homo sapiens
tggaggaagaagagctcaggtgg

SEQ ID NO: 7653 - DNA, 23 bp, Homo sapiens
tggaggacctaatgtgtgttggg

SEQ ID NO: 7654 - DNA, 23 bp, Homo sapiens
tggaggaggaacagctcaggtgg

SEQ ID NO: 7655 - DNA, 23 bp, Homo sapiens
tggaggaggaagagctcaggtgg

SEQ ID NO: 7656 - DNA, 23 bp, Homo sapiens
tggagggcacgtgcgtggacggg

SEQ ID NO: 7657 - DNA, 23 bp, Homo sapiens
tggagggcacgtgcgtggagtgg

SEQ ID NO: 7658 - DNA, 23 bp, Homo sapiens
tggagggccggtgcgtggacggg

SEQ ID NO: 7659 - DNA, 23 bp, Homo sapiens
tggagggccggtgcgtggagtgg

SEQ ID NO: 7660 - DNA, 23 bp, Homo sapiens
tggagggcctgatgtgtgttggg

SEQ ID NO: 7661 - DNA, 23 bp, Homo sapiens
tggagggcctgtgcgtggagtgg

SEQ ID NO: 7662 - DNA, 23 bp, Homo sapiens
tggagggcgagtgcgtggacggg

SEQ ID NO: 7663 - DNA, 23 bp, Homo sapiens
tggagggcgagtgcgtggagtgg

SEQ ID NO: 7664 - DNA, 23 bp, Homo sapiens
tggaggggaagacagtccctagg

SEQ ID NO: 7665 - DNA, 23 bp, Homo sapiens
tggagtaaggagggggatgaggg

SEQ ID NO: 7666 - DNA, 23 bp, Homo sapiens
tggagtgggagcctggggcaagg

SEQ ID NO: 7667 - DNA, 23 bp, Homo sapiens
tggatggcacgtgcgtggagtgg

SEQ ID NO: 7668 - DNA, 23 bp, Homo sapiens
tggatgtacggctgcgacctggg

SEQ ID NO: 7669 - DNA, 23 bp, Homo sapiens
tggatgtatggctgcgacctggg

SEQ ID NO: 7670 - DNA, 23 bp, Homo sapiens
tggatgtatggctgcgacgtggg

SEQ ID NO: 7671 - DNA, 23 bp, Homo sapiens
tggatgtattgagcatgcaatgg

SEQ ID NO: 7672 - DNA, 23 bp, Homo sapiens
tggatgtattgagcatgcgatgg

SEQ ID NO: 7673 - DNA, 23 bp, Homo sapiens
tggatgtgtggctgcgacctggg

SEQ ID NO: 7674 - DNA, 23 bp, Homo sapiens
tggatgtttggctgcgacctggg

SEQ ID NO: 7675 - DNA, 23 bp, Homo sapiens
tggattgggaagatggctctggg

SEQ ID NO: 7676 - DNA, 23 bp, Homo sapiens
tggcacacagggcccagactggg

SEQ ID NO: 7677 - DNA, 23 bp, Homo sapiens
tggcacacagggcccaggctggg

SEQ ID NO: 7678 - DNA, 23 bp, Homo sapiens
tggcacacagggtcccaggctgg

SEQ ID NO: 7679 - DNA, 23 bp, Homo sapiens
tggcaggtctgggggtgggtggg

SEQ ID NO: 7680 - DNA, 23 bp, Homo sapiens
tggccatcttgagaatggacagg

SEQ ID NO: 7681 - DNA, 23 bp, Homo sapiens
tggccattttgaggatggacagg

SEQ ID NO: 7682 - DNA, 23 bp, Homo sapiens
tggcccgtccgtaggggatgagg

SEQ ID NO: 7683 - DNA, 23 bp, Homo sapiens
tggcccgtccgtgggggatgagg

SEQ ID NO: 7684 - DNA, 23 bp, Homo sapiens
tggcctcatggtcagagacgggg

SEQ ID NO: 7685 - DNA, 23 bp, Homo sapiens
tggcctcatggtcagagaggggg

SEQ ID NO: 7686 - DNA, 23 bp, Homo sapiens
tggcctcatggtcagagatgggg

SEQ ID NO: 7687 - DNA, 23 bp, Homo sapiens
tggcctccaacgagaagaagagg

SEQ ID NO: 7688 - DNA, 23 bp, Homo sapiens
tggcctcccacgagaagaagagg

SEQ ID NO: 7689 - DNA, 23 bp, Homo sapiens
tggcctcccacgagaagaggagg

SEQ ID NO: 7690 - DNA, 23 bp, Homo sapiens
tggcctcccacgaggaggggagg

SEQ ID NO: 7691 - DNA, 23 bp, Homo sapiens
tggcctggtctccacaagctcgg

SEQ ID NO: 7692 - DNA, 23 bp, Homo sapiens
tggccttccacgaggaggggagg

SEQ ID NO: 7693 - DNA, 23 bp, Homo sapiens
tggcgggggcgcaggaccggggg

SEQ ID NO: 7694 - DNA, 23 bp, Homo sapiens
tggcgggtctcagcccctcctgg

SEQ ID NO: 7695 - DNA, 23 bp, Homo sapiens
tggcgggtctggggcggggtggg

SEQ ID NO: 7696 - DNA, 23 bp, Homo sapiens
tggcgggtctgggggtgggtggg

SEQ ID NO: 7697 - DNA, 23 bp, Homo sapiens
tggctagaggaggaattgtgagg

SEQ ID NO: 7698 - DNA, 23 bp, Homo sapiens
tggctagaggaggaattgtgggg

SEQ ID NO: 7699 - DNA, 23 bp, Homo sapiens
tggctatcttgagaatggacagg

SEQ ID NO: 7700 - DNA, 23 bp, Homo sapiens
tggctgttgtgatgtgtaggagg

SEQ ID NO: 7701 - DNA, 23 bp, Homo sapiens
tggctgttgttatgtgtaggagg

SEQ ID NO: 7702 - DNA, 23 bp, Homo sapiens
tgggaaaagaggagaaggtgagg

SEQ ID NO: 7703 - DNA, 23 bp, Homo sapiens
tgggaaaagaggggaaggtgagg

SEQ ID NO: 7704 - DNA, 23 bp, Homo sapiens
tgggaaaggaagggaagatgagg

SEQ ID NO: 7705 - DNA, 23 bp, Homo sapiens
tgggaaaggaggagaaggtgagg

SEQ ID NO: 7706 - DNA, 23 bp, Homo sapiens
tgggaaaggaggggaagacgagg

SEQ ID NO: 7707 - DNA, 23 bp, Homo sapiens
tgggaaaggaggggaagatgagg

SEQ ID NO: 7708 - DNA, 23 bp, Homo sapiens
tgggaaaggaggggaaggtgagg

SEQ ID NO: 7709 - DNA, 23 bp, Homo sapiens
tgggaagaaaatgccctatgagg

SEQ ID NO: 7710 - DNA, 23 bp, Homo sapiens
tgggaagaaaatgccctgtgagg

SEQ ID NO: 7711 - DNA, 23 bp, Homo sapiens
tgggaagaaaatgtcctgtgagg

SEQ ID NO: 7712 - DNA, 23 bp, Homo sapiens
tgggaagacggctctgggaaagg

SEQ ID NO: 7713 - DNA, 23 bp, Homo sapiens
tgggaagagtcagaaaattcagg

SEQ ID NO: 7714 - DNA, 23 bp, Homo sapiens
tgggaagatggccctgggaaagg

SEQ ID NO: 7715 - DNA, 23 bp, Homo sapiens
tgggaagatggctctgggaaagg

SEQ ID NO: 7716 - DNA, 23 bp, Homo sapiens
tgggaagcagcatccacacaggg

SEQ ID NO: 7717 - DNA, 23 bp, Homo sapiens
tgggaagcagcatcctcacaggg

SEQ ID NO: 7718 - DNA, 23 bp, Homo sapiens
tgggaagcagcatgcacacaggg

SEQ ID NO: 7719 - DNA, 23 bp, Homo sapiens
tgggagaagaagtgaaactcagg

SEQ ID NO: 7720 - DNA, 23 bp, Homo sapiens
tgggagcctggggcaaggagggg

SEQ ID NO: 7721 - DNA, 23 bp, Homo sapiens
tgggagcctgggggagaggaggg

SEQ ID NO: 7722 - DNA, 23 bp, Homo sapiens
tgggagcctgggggccaggaggg

SEQ ID NO: 7723 - DNA, 23 bp, Homo sapiens
tgggagcctgggggcgaggaggg

SEQ ID NO: 7724 - DNA, 23 bp, Homo sapiens
tgggagcctgggggtgaggaggg

SEQ ID NO: 7725 - DNA, 23 bp, Homo sapiens
tgggagggaaacggcctctgcgg

SEQ ID NO: 7726 - DNA, 23 bp, Homo sapiens
tgggagggaaacggcctctgggg

SEQ ID NO: 7727 - DNA, 23 bp, Homo sapiens
tgggagggaagcggcctctgcgg

SEQ ID NO: 7728 - DNA, 23 bp, Homo sapiens
tgggagggaatcggcctctgcgg

SEQ ID NO: 7729 - DNA, 23 bp, Homo sapiens
tgggataatctcctattcattgg

SEQ ID NO: 7730 - DNA, 23 bp, Homo sapiens
tgggataatctcctattccgtgg

SEQ ID NO: 7731 - DNA, 23 bp, Homo sapiens
tgggataatctcctattctttgg

SEQ ID NO: 7732 - DNA, 23 bp, Homo sapiens
tgggatgcagcatccacacaggg

SEQ ID NO: 7733 - DNA, 23 bp, Homo sapiens
tgggatggcccacgtgtggatgg

SEQ ID NO: 7734 - DNA, 23 bp, Homo sapiens
tgggatggcccaggtgtggatgg

SEQ ID NO: 7735 - DNA, 23 bp, Homo sapiens
tgggatggcccatgtgtggatgg

SEQ ID NO: 7736 - DNA, 23 bp, Homo sapiens
tgggcaggacacctggggtgggg

SEQ ID NO: 7737 - DNA, 23 bp, Homo sapiens
tgggcaggtgagtgcggggtcgg

SEQ ID NO: 7738 - DNA, 23 bp, Homo sapiens
tgggccacctggcccgtccgtgg

SEQ ID NO: 7739 - DNA, 23 bp, Homo sapiens
tgggccctgggcttctaccctgg

SEQ ID NO: 7740 - DNA, 23 bp, Homo sapiens
tgggccggtgagtgcgggatcgg

SEQ ID NO: 7741 - DNA, 23 bp, Homo sapiens
tgggccggtgagtgcggggtcgg

SEQ ID NO: 7742 - DNA, 23 bp, Homo sapiens
tgggccggtgagtgcggggttgg

SEQ ID NO: 7743 - DNA, 23 bp, Homo sapiens
tgggccggtgagtgcgggtcggg

SEQ ID NO: 7744 - DNA, 23 bp, Homo sapiens
tgggcctgtgagtgcgaggttgg

SEQ ID NO: 7745 - DNA, 23 bp, Homo sapiens
tgggcctgtgagtgcggggttgg

SEQ ID NO: 7746 - DNA, 23 bp, Homo sapiens
tgggcgacccggcccgtccgtgg

SEQ ID NO: 7747 - DNA, 23 bp, Homo sapiens
tgggcgacccgggccgtccgtgg

SEQ ID NO: 7748 - DNA, 23 bp, Homo sapiens
tgggcgacctggcccgtccgtgg

SEQ ID NO: 7749 - DNA, 23 bp, Homo sapiens
tgggcggattccgcagcctcggg

SEQ ID NO: 7750 - DNA, 23 bp, Homo sapiens
tgggcggggctcgggggactggg

SEQ ID NO: 7751 - DNA, 23 bp, Homo sapiens
tgggcgggggggcggggaggggg

SEQ ID NO: 7752 - DNA, 23 bp, Homo sapiens
tgggcggggggggcggggagggg

SEQ ID NO: 7753 - DNA, 23 bp, Homo sapiens
tgggcgggggggggtggggtggg

SEQ ID NO: 7754 - DNA, 23 bp, Homo sapiens
tgggcggggggggtggggtgggg

SEQ ID NO: 7755 - DNA, 23 bp, Homo sapiens
tgggcgggtcccgcggcctcagg

SEQ ID NO: 7756 - DNA, 23 bp, Homo sapiens
tgggcgggtcccgcggcctcggg

SEQ ID NO: 7757 - DNA, 23 bp, Homo sapiens
tgggcgggtgagtgcggggtcgg

SEQ ID NO: 7758 - DNA, 23 bp, Homo sapiens
tgggcgggttccgcagcctcggg

SEQ ID NO: 7759 - DNA, 23 bp, Homo sapiens
tgggctgggaagacagctctggg

SEQ ID NO: 7760 - DNA, 23 bp, Homo sapiens
tgggctgggaagacggctctggg

SEQ ID NO: 7761 - DNA, 23 bp, Homo sapiens
tgggctgggaagatggccctggg

SEQ ID NO: 7762 - DNA, 23 bp, Homo sapiens
tgggctgggaagatggctctggg

SEQ ID NO: 7763 - DNA, 23 bp, Homo sapiens
tgggctggtgagtgcggggtcgg

SEQ ID NO: 7764 - DNA, 23 bp, Homo sapiens
tggggagctgaagtggtcggggg

SEQ ID NO: 7765 - DNA, 23 bp, Homo sapiens
tggggagctgaagtggtctgggg

SEQ ID NO: 7766 - DNA, 23 bp, Homo sapiens
tggggcagagggaaaaggcctgg

SEQ ID NO: 7767 - DNA, 23 bp, Homo sapiens
tggggcagaggggaaaggcctgg

SEQ ID NO: 7768 - DNA, 23 bp, Homo sapiens
tggggcagtggggaaaggcctgg

SEQ ID NO: 7769 - DNA, 23 bp, Homo sapiens
tggggcggggctcgcgggacggg

SEQ ID NO: 7770 - DNA, 23 bp, Homo sapiens
tggggcggggctcgggggaccgg

SEQ ID NO: 7771 - DNA, 23 bp, Homo sapiens
tggggcggggctcgggggacggg

SEQ ID NO: 7772 - DNA, 23 bp, Homo sapiens
tggggcggggtggggcagagggg

SEQ ID NO: 7773 - DNA, 23 bp, Homo sapiens
tggggcttgaaacccccagtggg

SEQ ID NO: 7774 - DNA, 23 bp, Homo sapiens
tggggcttgaaactcccagtggg

SEQ ID NO: 7775 - DNA, 23 bp, Homo sapiens
tgggggactgggctgaccgcggg

SEQ ID NO: 7776 - DNA, 23 bp, Homo sapiens
tgggggtggcgggtctggggcgg

SEQ ID NO: 7777 - DNA, 23 bp, Homo sapiens
tgggggtgggtggggcagagggg

SEQ ID NO: 7778 - DNA, 23 bp, Homo sapiens
tgggggtgggtggggcagtgggg

SEQ ID NO: 7779 - DNA, 23 bp, Homo sapiens
tgggggtgtcatgtctcttaggg

SEQ ID NO: 7780 - DNA, 23 bp, Homo sapiens
tgggggtgtcatgtcttttacgg

SEQ ID NO: 7781 - DNA, 23 bp, Homo sapiens
tgggggtgtcatgtcttttaggg

SEQ ID NO: 7782 - DNA, 23 bp, Homo sapiens
tggggtaaggagggagacggggg

SEQ ID NO: 7783 - DNA, 23 bp, Homo sapiens
tggggtaaggagggagatggggg

SEQ ID NO: 7784 - DNA, 23 bp, Homo sapiens
tggggtaaggaggggaatggggg

SEQ ID NO: 7785 - DNA, 23 bp, Homo sapiens
tggggtaaggagggggatgaggg

SEQ ID NO: 7786 - DNA, 23 bp, Homo sapiens
tggggtctagagtgggcgggggg

SEQ ID NO: 7787 - DNA, 23 bp, Homo sapiens
tggggtgaagggatgaagggtgg

SEQ ID NO: 7788 - DNA, 23 bp, Homo sapiens
tggggtgaaggggtgaagggtgg

SEQ ID NO: 7789 - DNA, 23 bp, Homo sapiens
tggggtggcaggtctgggggtgg

SEQ ID NO: 7790 - DNA, 23 bp, Homo sapiens
tggggtggcgggtctgggggtgg

SEQ ID NO: 7791 - DNA, 23 bp, Homo sapiens
tggggtggggagggggcagaggg

SEQ ID NO: 7792 - DNA, 23 bp, Homo sapiens
tggggtggggcagagggaaaagg

SEQ ID NO: 7793 - DNA, 23 bp, Homo sapiens
tgggtcacatgtgtctttggggg

SEQ ID NO: 7794 - DNA, 23 bp, Homo sapiens
tgggtcacgtgtgtctttggggg

SEQ ID NO: 7795 - DNA, 23 bp, Homo sapiens
tgggtcagggctgaggcttgggg

SEQ ID NO: 7796 - DNA, 23 bp, Homo sapiens
tgggtcatatgtgtcttgggggg

SEQ ID NO: 7797 - DNA, 23 bp, Homo sapiens
tgggtctgcagtcatagttctgg

SEQ ID NO: 7798 - DNA, 23 bp, Homo sapiens
tgggtctgcagtcgtagttctgg

SEQ ID NO: 7799 - DNA, 23 bp, Homo sapiens
tgggtctgtagtcatacttctgg

SEQ ID NO: 7800 - DNA, 23 bp, Homo sapiens
tgggtgacctggcccgtccgtgg

SEQ ID NO: 7801 - DNA, 23 bp, Homo sapiens
tgggtgggggtggcgggtctggg

SEQ ID NO: 7802 - DNA, 23 bp, Homo sapiens
tgggtggggtggcaggtctgggg

SEQ ID NO: 7803 - DNA, 23 bp, Homo sapiens
tgggtggggtggcgggtctgggg

SEQ ID NO: 7804 - DNA, 23 bp, Homo sapiens
tgggttttcttgtcccactgggg

SEQ ID NO: 7805 - DNA, 23 bp, Homo sapiens
tggtacaggatctggaacccagg

SEQ ID NO: 7806 - DNA, 23 bp, Homo sapiens
tggtcacatgggtggtcctaggg

SEQ ID NO: 7807 - DNA, 23 bp, Homo sapiens
tggtcaccgctatgatgtgtagg

SEQ ID NO: 7808 - DNA, 23 bp, Homo sapiens
tggtcgctactgtgatgtgtagg

SEQ ID NO: 7809 - DNA, 23 bp, Homo sapiens
tggtcgctgccgtgatgtggagg

SEQ ID NO: 7810 - DNA, 23 bp, Homo sapiens
tggtcgctgctgtgaggtggagg

SEQ ID NO: 7811 - DNA, 23 bp, Homo sapiens
tggtcgctgctgtgatacatagg

SEQ ID NO: 7812 - DNA, 23 bp, Homo sapiens
tggtcgctgctgtgatgtggagg

SEQ ID NO: 7813 - DNA, 23 bp, Homo sapiens
tggtcgctgctgtgatgtgtagg

SEQ ID NO: 7814 - DNA, 23 bp, Homo sapiens
tggtcgctgctgtggtgtgtagg

SEQ ID NO: 7815 - DNA, 23 bp, Homo sapiens
tggtcggggcggggcggggcggg

SEQ ID NO: 7816 - DNA, 23 bp, Homo sapiens
tggtctggtctccacaagctcgg

SEQ ID NO: 7817 - DNA, 23 bp, Homo sapiens
tggtgaaatacctcatggagtgg

SEQ ID NO: 7818 - DNA, 23 bp, Homo sapiens
tggtgagtcatatgcgtcctggg

SEQ ID NO: 7819 - DNA, 23 bp, Homo sapiens
tggtgagtcatatgcgtcttggg

SEQ ID NO: 7820 - DNA, 23 bp, Homo sapiens
tggtgagtcatatgcgttttggg

SEQ ID NO: 7821 - DNA, 23 bp, Homo sapiens
tggtgagtcatatgtgtcttggg

SEQ ID NO: 7822 - DNA, 23 bp, Homo sapiens
tggtgagtgcggggtcggcaggg

SEQ ID NO: 7823 - DNA, 23 bp, Homo sapiens
tggtgagtgcggggtcgggaggg

SEQ ID NO: 7824 - DNA, 23 bp, Homo sapiens
tggtgcttccagtaacaaggcgg

SEQ ID NO: 7825 - DNA, 23 bp, Homo sapiens
tggtgcttccagtaacgaggtgg

SEQ ID NO: 7826 - DNA, 23 bp, Homo sapiens
tggtggacatcggggtggggtgg

SEQ ID NO: 7827 - DNA, 23 bp, Homo sapiens
tggtggacatgggggtggggtgg

SEQ ID NO: 7828 - DNA, 23 bp, Homo sapiens
tggtggctgttgtgatgtgtagg

SEQ ID NO: 7829 - DNA, 23 bp, Homo sapiens
tggtggctgttgttatgtgtagg

SEQ ID NO: 7830 - DNA, 23 bp, Homo sapiens
tggtgggggtgggagtgtggagg

SEQ ID NO: 7831 - DNA, 23 bp, Homo sapiens
tggtgggtcacatgtgtctttgg

SEQ ID NO: 7832 - DNA, 23 bp, Homo sapiens
tggtgggtcacgtgtgtctttgg

SEQ ID NO: 7833 - DNA, 23 bp, Homo sapiens
tggtgggtcatatgtgtcttggg

SEQ ID NO: 7834 - DNA, 23 bp, Homo sapiens
tggttcccaaggctgctgcaggg

SEQ ID NO: 7835 - DNA, 23 bp, Homo sapiens
tggttccctttgacacacacagg

SEQ ID NO: 7836 - DNA, 23 bp, Homo sapiens
tggttccctttgacacacaccgg

SEQ ID NO: 7837 - DNA, 23 bp, Homo sapiens
tgtaaaggtgagagcctggaggg

SEQ ID NO: 7838 - DNA, 23 bp, Homo sapiens
tgtaaaggtgagagcttggaggg

SEQ ID NO: 7839 - DNA, 23 bp, Homo sapiens
tgtaccagagagtgactctgagg

SEQ ID NO: 7840 - DNA, 23 bp, Homo sapiens
tgtagaaatacctcatggagtgg

SEQ ID NO: 7841 - DNA, 23 bp, Homo sapiens
tgtagaaatacttcatggagtgg

SEQ ID NO: 7842 - DNA, 23 bp, Homo sapiens
tgtcacaaaagagtaagtgctgg

SEQ ID NO: 7843 - DNA, 23 bp, Homo sapiens
tgtcccggacggggctctcaggg

SEQ ID NO: 7844 - DNA, 23 bp, Homo sapiens
tgtcccgtccattctcaggctgg

SEQ ID NO: 7845 - DNA, 23 bp, Homo sapiens
tgtcctgcccattctcaggctgg

SEQ ID NO: 7846 - DNA, 23 bp, Homo sapiens
tgtcctgtccatcctcaaaatgg

SEQ ID NO: 7847 - DNA, 23 bp, Homo sapiens
tgtcctgtccattctcaagatgg

SEQ ID NO: 7848 - DNA, 23 bp, Homo sapiens
tgtcctgtccattctcaggatgg

SEQ ID NO: 7849 - DNA, 23 bp, Homo sapiens
tgtcctgtccattctcaggctgg

SEQ ID NO: 7850 - DNA, 23 bp, Homo sapiens
tgtcctgtccgttctcaggatgg

SEQ ID NO: 7851 - DNA, 23 bp, Homo sapiens
tgtcctgtgagataccagaaagg

SEQ ID NO: 7852 - DNA, 23 bp, Homo sapiens
tgtcctgtgagctaccagaaagg

SEQ ID NO: 7853 - DNA, 23 bp, Homo sapiens
tgtcctgtgagggcactgggagg

SEQ ID NO: 7854 - DNA, 23 bp, Homo sapiens
tgtcctgtgaggggactgggagg

SEQ ID NO: 7855 - DNA, 23 bp, Homo sapiens
tgtcgaaatacctcatggagtgg

SEQ ID NO: 7856 - DNA, 23 bp, Homo sapiens
tgtcttggggggggtctgacggg

SEQ ID NO: 7857 - DNA, 23 bp, Homo sapiens
tgtgaagcacatgacaacgaagg

SEQ ID NO: 7858 - DNA, 23 bp, Homo sapiens
tgtgaagcacatgacaatgaagg

SEQ ID NO: 7859 - DNA, 23 bp, Homo sapiens
tgtgaatgcagacccagggcagg

SEQ ID NO: 7860 - DNA, 23 bp, Homo sapiens
tgtgacacatgtgacaatgaagg

SEQ ID NO: 7861 - DNA, 23 bp, Homo sapiens
tgtgactgcagacccagggcagg

SEQ ID NO: 7862 - DNA, 23 bp, Homo sapiens
tgtgactgcagacccagggcggg

SEQ ID NO: 7863 - DNA, 23 bp, Homo sapiens
tgtgagacagctgccttgtgtgg

SEQ ID NO: 7864 - DNA, 23 bp, Homo sapiens
tgtgagtccgggtgggtgactgg

SEQ ID NO: 7865 - DNA, 23 bp, Homo sapiens
tgtgcagcacgaggggctgcagg

SEQ ID NO: 7866 - DNA, 23 bp, Homo sapiens
tgtgcagcacgaggggctgccgg

SEQ ID NO: 7867 - DNA, 23 bp, Homo sapiens
tgtgcccccttccccaccccagg

SEQ ID NO: 7868 - DNA, 23 bp, Homo sapiens
tgtgcccccttccctaccccagg

SEQ ID NO: 7869 - DNA, 23 bp, Homo sapiens
tgtgccgccttccccaccccagg

SEQ ID NO: 7870 - DNA, 23 bp, Homo sapiens
tgtgctcccttccccatcccagg

SEQ ID NO: 7871 - DNA, 23 bp, Homo sapiens
tgtgctctcttccccatcccagg

SEQ ID NO: 7872 - DNA, 23 bp, Homo sapiens
tgtgctctcttccccatcccggg

SEQ ID NO: 7873 - DNA, 23 bp, Homo sapiens
tgtggaaatacctcatggagtgg

SEQ ID NO: 7874 - DNA, 23 bp, Homo sapiens
tgtggagaccaggcctgcagggg

SEQ ID NO: 7875 - DNA, 23 bp, Homo sapiens
tgtggctagaggaggaattgtgg

SEQ ID NO: 7876 - DNA, 23 bp, Homo sapiens
tgtgggacaagaggaattatggg

SEQ ID NO: 7877 - DNA, 23 bp, Homo sapiens
tgtgggcatcattgctggcctgg

SEQ ID NO: 7878 - DNA, 23 bp, Homo sapiens
tgtggtggtaccttctggaaagg

SEQ ID NO: 7879 - DNA, 23 bp, Homo sapiens
tgtggtggtaccttctggagagg

SEQ ID NO: 7880 - DNA, 23 bp, Homo sapiens
tgtggtggtgccttctggacagg

SEQ ID NO: 7881 - DNA, 23 bp, Homo sapiens
tgtggtggtgccttctggagagg

SEQ ID NO: 7882 - DNA, 23 bp, Homo sapiens
tgtgtcccggcccggccgcgggg

SEQ ID NO: 7883 - DNA, 23 bp, Homo sapiens
tgtgtcttgggggggtctgacgg

SEQ ID NO: 7884 - DNA, 23 bp, Homo sapiens
tgtgtctttgggcgttctgacgg

SEQ ID NO: 7885 - DNA, 23 bp, Homo sapiens
tgtgtctttggggggtctgatgg

SEQ ID NO: 7886 - DNA, 23 bp, Homo sapiens
tgtgtctttgggggttctgacgg

SEQ ID NO: 7887 - DNA, 23 bp, Homo sapiens
tgtgtctttgggtgttctgacgg

SEQ ID NO: 7888 - DNA, 23 bp, Homo sapiens
tgtgtctttgggtgttctgatgg

SEQ ID NO: 7889 - DNA, 23 bp, Homo sapiens
tgtgtttcctgatcctgccctgg

SEQ ID NO: 7890 - DNA, 23 bp, Homo sapiens
tgttcagcacgaggggctgccgg

SEQ ID NO: 7891 - DNA, 23 bp, Homo sapiens
ttaaggccctgactcctttctgg

SEQ ID NO: 7892 - DNA, 23 bp, Homo sapiens
ttaaggccctggctcctttctgg

SEQ ID NO: 7893 - DNA, 23 bp, Homo sapiens
ttaagggataaaatctctgaagg

SEQ ID NO: 7894 - DNA, 23 bp, Homo sapiens
ttaagggataaaatctctgacgg

SEQ ID NO: 7895 - DNA, 23 bp, Homo sapiens
ttaattgtcctagagagaagagg

SEQ ID NO: 7896 - DNA, 23 bp, Homo sapiens
ttaattgtcctagagagcagagg

SEQ ID NO: 7897 - DNA, 23 bp, Homo sapiens
ttaattgtctagagagaagaggg

SEQ ID NO: 7898 - DNA, 23 bp, Homo sapiens
ttaccccagctcagggtgagggg

SEQ ID NO: 7899 - DNA, 23 bp, Homo sapiens
ttaccccatctcagggtgagggg

SEQ ID NO: 7900 - DNA, 23 bp, Homo sapiens
ttactccatctcagggtgagggg

SEQ ID NO: 7901 - DNA, 23 bp, Homo sapiens
ttactccatctcagggtgcaggg

SEQ ID NO: 7902 - DNA, 23 bp, Homo sapiens
ttagaggaacctcctagtcttgg

SEQ ID NO: 7903 - DNA, 23 bp, Homo sapiens
ttagaggaacctcctcgtcttgg

SEQ ID NO: 7904 - DNA, 23 bp, Homo sapiens
ttaggggaacctcctagtcttgg

SEQ ID NO: 7905 - DNA, 23 bp, Homo sapiens
ttcacactcaatatgtgtggggg

SEQ ID NO: 7906 - DNA, 23 bp, Homo sapiens
ttcacactcaatgtgtgtggggg

SEQ ID NO: 7907 - DNA, 23 bp, Homo sapiens
ttcacatccgtgtcccggcccgg

SEQ ID NO: 7908 - DNA, 23 bp, Homo sapiens
ttcacatccgtgtcccggcctgg

SEQ ID NO: 7909 - DNA, 23 bp, Homo sapiens
ttcagcccctcctcgcccccagg

SEQ ID NO: 7910 - DNA, 23 bp, Homo sapiens
ttcaggagggcggttggtccagg

SEQ ID NO: 7911 - DNA, 23 bp, Homo sapiens
ttcaggtagggaaggggtgaggg

SEQ ID NO: 7912 - DNA, 23 bp, Homo sapiens
ttcatatccatcacagtgagggg

SEQ ID NO: 7913 - DNA, 23 bp, Homo sapiens
ttcatatctgtcacagtgagggg

SEQ ID NO: 7914 - DNA, 23 bp, Homo sapiens
ttcatggagtgggagcctggggg

SEQ ID NO: 7915 - DNA, 23 bp, Homo sapiens
ttccagcattcatgagtcagggg

SEQ ID NO: 7916 - DNA, 23 bp, Homo sapiens
ttccagcattcgtgagtcagggg

SEQ ID NO: 7917 - DNA, 23 bp, Homo sapiens
ttcccacagatagaaaaggaggg

SEQ ID NO: 7918 - DNA, 23 bp, Homo sapiens
ttcccacaggtggaaaaggaggg

SEQ ID NO: 7919 - DNA, 23 bp, Homo sapiens
ttcccacagttagaaaaggaggg

SEQ ID NO: 7920 - DNA, 23 bp, Homo sapiens
ttcccactcccattgggtattgg

SEQ ID NO: 7921 - DNA, 23 bp, Homo sapiens
ttcccactcccattgggtgtcgg

SEQ ID NO: 7922 - DNA, 23 bp, Homo sapiens
ttcccctgactcacgaatgctgg

SEQ ID NO: 7923 - DNA, 23 bp, Homo sapiens
ttcccctgactcatgaatgctgg

SEQ ID NO: 7924 - DNA, 23 bp, Homo sapiens
ttccctttgacacacaccggcgg

SEQ ID NO: 7925 - DNA, 23 bp, Homo sapiens
ttcctcccagtcccctcacaggg

SEQ ID NO: 7926 - DNA, 23 bp, Homo sapiens
ttcctctccctcaggaccagagg

SEQ ID NO: 7927 - DNA, 23 bp, Homo sapiens
ttcctctccctcaggagcagagg

SEQ ID NO: 7928 - DNA, 23 bp, Homo sapiens
ttccttttgggtccaagacgagg

SEQ ID NO: 7929 - DNA, 23 bp, Homo sapiens
ttccttttgggtccaagactagg

SEQ ID NO: 7930 - DNA, 23 bp, Homo sapiens
ttccttttggttccaagacgagg

SEQ ID NO: 7931 - DNA, 23 bp, Homo sapiens
ttcggggcggatctcggacccgg

SEQ ID NO: 7932 - DNA, 23 bp, Homo sapiens
ttcggggtggatctcggacccgg

SEQ ID NO: 7933 - DNA, 23 bp, Homo sapiens
ttcgtatctgtcacagtgagggg

SEQ ID NO: 7934 - DNA, 23 bp, Homo sapiens
ttctcacagatagaaaaggaggg

SEQ ID NO: 7935 - DNA, 23 bp, Homo sapiens
ttctcactcccattgggtgtcgg

SEQ ID NO: 7936 - DNA, 23 bp, Homo sapiens
ttctcagctgctccgccacacgg

SEQ ID NO: 7937 - DNA, 23 bp, Homo sapiens
ttctccccagaccccgaggatgg

SEQ ID NO: 7938 - DNA, 23 bp, Homo sapiens
ttctccccagacgccgaggatgg

SEQ ID NO: 7939 - DNA, 23 bp, Homo sapiens
ttctcgtgggaggccatccccgg

SEQ ID NO: 7940 - DNA, 23 bp, Homo sapiens
ttctcgttggaggccatccccgg

SEQ ID NO: 7941 - DNA, 23 bp, Homo sapiens
ttctggagggtgtgagaccctgg

SEQ ID NO: 7942 - DNA, 23 bp, Homo sapiens
ttctgggagctgaagtggtcggg

SEQ ID NO: 7943 - DNA, 23 bp, Homo sapiens
ttctggggagctgaagtggtcgg

SEQ ID NO: 7944 - DNA, 23 bp, Homo sapiens
ttctgtttttgtcctaccccagg

SEQ ID NO: 7945 - DNA, 23 bp, Homo sapiens
ttctgtttttgttctaccccagg

SEQ ID NO: 7946 - DNA, 23 bp, Homo sapiens
ttcttcaagtcacaaagggaagg

SEQ ID NO: 7947 - DNA, 23 bp, Homo sapiens
ttcttctcccaacctatgtcggg

SEQ ID NO: 7948 - DNA, 23 bp, Homo sapiens
ttcttctcccaacctgcgacggg

SEQ ID NO: 7949 - DNA, 23 bp, Homo sapiens
ttcttctcccaacctgcgtcggg

SEQ ID NO: 7950 - DNA, 23 bp, Homo sapiens
ttcttctcccaacctgtgtcggg

SEQ ID NO: 7951 - DNA, 23 bp, Homo sapiens
ttcttctcccaacttgtgtcggg

SEQ ID NO: 7952 - DNA, 23 bp, Homo sapiens
ttcttcttccaacctgcgtcggg

SEQ ID NO: 7953 - DNA, 23 bp, Homo sapiens
ttcttggggtctagagtgggcgg

SEQ ID NO: 7954 - DNA, 23 bp, Homo sapiens
ttcttggggtctagagtgggtgg

SEQ ID NO: 7955 - DNA, 23 bp, Homo sapiens
ttgaaaaggtgagattcttgggg

SEQ ID NO: 7956 - DNA, 23 bp, Homo sapiens
ttgacaccggcagcagccttggg

SEQ ID NO: 7957 - DNA, 23 bp, Homo sapiens
ttgacccctgcagcagccttggg

SEQ ID NO: 7958 - DNA, 23 bp, Homo sapiens
ttgagaatggacaggacacccgg

SEQ ID NO: 7959 - DNA, 23 bp, Homo sapiens
ttgagaatggacaggacacctgg

SEQ ID NO: 7960 - DNA, 23 bp, Homo sapiens
ttgaggatggacaggacacctgg

SEQ ID NO: 7961 - DNA, 23 bp, Homo sapiens
ttgagtccgggtgggtgcgtggg

SEQ ID NO: 7962 - DNA, 23 bp, Homo sapiens
ttgcctctcagtcccacacaagg

SEQ ID NO: 7963 - DNA, 23 bp, Homo sapiens
ttgcgtgtaagtgatggcggcgg

SEQ ID NO: 7964 - DNA, 23 bp, Homo sapiens
ttgctctatccacggcgcccggg

SEQ ID NO: 7965 - DNA, 23 bp, Homo sapiens
ttggaaagttctagtctctgagg

SEQ ID NO: 7966 - DNA, 23 bp, Homo sapiens
ttggaccgcggcggacatggcgg

SEQ ID NO: 7967 - DNA, 23 bp, Homo sapiens
ttggaggacctaatgtgtgttgg

SEQ ID NO: 7968 - DNA, 23 bp, Homo sapiens
ttggagggcctgatgtgtgttgg

SEQ ID NO: 7969 - DNA, 23 bp, Homo sapiens
ttgggagaagtgaaactcagggg

SEQ ID NO: 7970 - DNA, 23 bp, Homo sapiens
ttgggagggaaacggcctctggg

SEQ ID NO: 7971 - DNA, 23 bp, Homo sapiens
ttgggggactgggctgaccgcgg

SEQ ID NO: 7972 - DNA, 23 bp, Homo sapiens
ttggggtctagagtgggcggggg

SEQ ID NO: 7973 - DNA, 23 bp, Homo sapiens
ttggggtctagagtgggtggggg

SEQ ID NO: 7974 - DNA, 23 bp, Homo sapiens
ttgggtgttgggcagaacagtgg

SEQ ID NO: 7975 - DNA, 23 bp, Homo sapiens
ttgggtgttgggcggaacagtgg

SEQ ID NO: 7976 - DNA, 23 bp, Homo sapiens
ttgggtgttggggggaacagtgg

SEQ ID NO: 7977 - DNA, 23 bp, Homo sapiens
ttgggtgttgggtggaacagtgg

SEQ ID NO: 7978 - DNA, 23 bp, Homo sapiens
ttggtcggggcggggcggggcgg

SEQ ID NO: 7979 - DNA, 23 bp, Homo sapiens
ttgtaaaggtgagagcctggagg

SEQ ID NO: 7980 - DNA, 23 bp, Homo sapiens
ttgtaaaggtgagagcttggagg

SEQ ID NO: 7981 - DNA, 23 bp, Homo sapiens
ttgtctcccctccttgtgggagg

SEQ ID NO: 7982 - DNA, 23 bp, Homo sapiens
ttgtggagaccaggcctgcaggg

SEQ ID NO: 7983 - DNA, 23 bp, Homo sapiens
ttgtggttgggagcccatggggg

SEQ ID NO: 7984 - DNA, 23 bp, Homo sapiens
ttgtgtcgggtccttcttccagg

SEQ ID NO: 7985 - DNA, 23 bp, Homo sapiens
ttgtgtttgggagcccatggggg

SEQ ID NO: 7986 - DNA, 23 bp, Homo sapiens
ttgtgtttgggagcccgtggggg

SEQ ID NO: 7987 - DNA, 23 bp, Homo sapiens
tttaggccaaaaatccccccagg

SEQ ID NO: 7988 - DNA, 23 bp, Homo sapiens
tttaggccaaaaatccccccggg

SEQ ID NO: 7989 - DNA, 23 bp, Homo sapiens
tttaggccaaaaattcccccggg

SEQ ID NO: 7990 - DNA, 23 bp, Homo sapiens
tttcagcattcatgagtcagggg

SEQ ID NO: 7991 - DNA, 23 bp, Homo sapiens
tttcctcccctcctcgtggaagg

SEQ ID NO: 7992 - DNA, 23 bp, Homo sapiens
tttcctcccctcctcgtgggagg

SEQ ID NO: 7993 - DNA, 23 bp, Homo sapiens
tttcctcctcttctcgtgggagg

SEQ ID NO: 7994 - DNA, 23 bp, Homo sapiens
tttcctcttcttctcgtgggagg

SEQ ID NO: 7995 - DNA, 23 bp, Homo sapiens
tttcctcttcttctcgttggagg

SEQ ID NO: 7996 - DNA, 23 bp, Homo sapiens
tttcctgttccagagaggtgggg

SEQ ID NO: 7997 - DNA, 23 bp, Homo sapiens
tttcctgttgcagagaggtgggg

SEQ ID NO: 7998 - DNA, 23 bp, Homo sapiens
tttcttcccacagatagaaaagg

SEQ ID NO: 7999 - DNA, 23 bp, Homo sapiens
tttcttcccacaggtggaaaagg

SEQ ID NO: 8000 - DNA, 23 bp, Homo sapiens
tttcttcccacagttagaaaagg

SEQ ID NO: 8001 - DNA, 23 bp, Homo sapiens
tttcttctcacagatagaaaagg

SEQ ID NO: 8002 - DNA, 23 bp, Homo sapiens
tttgacaccggcagcagccttgg

SEQ ID NO: 8003 - DNA, 23 bp, Homo sapiens
tttgaccactgcagcagctgtgg

SEQ ID NO: 8004 - DNA, 23 bp, Homo sapiens
tttgaccactgcggcagctgtgg

SEQ ID NO: 8005 - DNA, 23 bp, Homo sapiens
tttgaccactttgaccactgcgg

SEQ ID NO: 8006 - DNA, 23 bp, Homo sapiens
tttgacccctgcagcagccttgg

SEQ ID NO: 8007 - DNA, 23 bp, Homo sapiens
tttgagtccgggtgggtgcgtgg

SEQ ID NO: 8008 - DNA, 23 bp, Homo sapiens
tttgcagaaagagatgccagagg

SEQ ID NO: 8009 - DNA, 23 bp, Homo sapiens
tttgtagaaagagatgccagagg

SEQ ID NO: 8010 - DNA, 23 bp, Homo sapiens
tttgtgacttcaagagcctctgg

SEQ ID NO: 8011 - DNA, 23 bp, Homo sapiens
ttttcccgagtttcctctgaggg

SEQ ID NO: 8012 - DNA, 23 bp, Homo sapiens
ttttcctgagtttcctctgaggg

SEQ ID NO: 8013 - DNA, 23 bp, Homo sapiens
ttttcctgagtttcttctgaggg

SEQ ID NO: 8014 - DNA, 29 bp, Homo sapiens
acaccatcaactgcgaccagttcagcagg

SEQ ID NO: 8015 - DNA, 24 bp, Homo sapiens
acacactgcgaccagttcagcagg

SEQ ID NO: 8016 - DNA, 30 bp, Homo sapiens
acaccatcaaactgcgaccagttcagcagg

SEQ ID NO: 8017 - DNA, 23 bp, Homo sapiens
gctgaactggtcgcagttgatgg

1. A method for producing, from a donor cell, a low-antigenic cell in which a rejection reaction is reduced in a case where the cell is allogeneically transplanted into a recipient, the method comprising:
determining human leukocyte antigen (HLA) alleles for the donor cell and the recipient, respectively;
specifying an HLA allele that is present in the donor cell but is not present in the recipient; and
disrupting or modifying the specified HLA allele to obtain a cell population including a cell not expressing an HLA protein specific to the donor cell,
wherein the cell not expressing the HLA protein specific to the donor cell is the low-antigenic cell.

2. The production method according to claim 1, wherein the HLA allele determined in the determining the HLA alleles for the donor cell and the recipient, respectively, includes an HLA-A allele, an HLA-B allele, and an HLA-C allele.

3. The production method according to claim 1, further comprising:
recovering the cell not expressing the HLA protein specific to the donor cell from the cell population after the obtaining of the cell population including the cell not expressing the HLA protein specific to the donor cell,
wherein the recovering includes
bringing the cell population into contact with an HLA protein expression-inducing agent, and
recovering the cell not expressing the HLA protein specific to the donor cell from the cell population using, as an index, expression of the HLA protein specific to the donor cell in the cell population brought into contact with the HLA protein expression-inducing agent.

4. The production method according to claim 3, wherein the HLA protein expression-inducing agent is interferon (IFN)-γ, IFN-α, IFN-β, interleukin (IL)-4, granulocyte macrophage colony-stimulating factor (GM-CSF), transforming growth factor (TGF)-α, or TGF-β.

5. The production method according to claim 1, wherein the low-antigenic cell is a pluripotent stem cell.

6. (canceled)

7. (canceled)

8. (canceled)

9. (canceled)

10. A cell in which at least one HLA allele is disrupted or modified and at least one kind of HLA protein can be expressed.

11. The cell according to claim 10, wherein the HLA allele includes an HLA-A allele, an HLA-B allele, or an HLA-C allele.

12. The cell according to claim 10, which is a low-antigenic cell in which a rejection reaction is reduced in a case where the cell is allogeneically transplanted into a recipient, and in which the disrupted or modified HLA allele is an HLA allele that is not present in the recipient.

13. The cell according to claim 10, which is a pluripotent stem cell.

14. The cell according to claim 10, wherein at least one allele of a class II major histocompatibility complex transactivator (CIITA) allele, a regulatory factor X5 (RFX5) allele, a regulatory factor X associated protein (RFXAP) allele, or a regulatory factor X associated ankyrin containing protein (RFXANK) allele is further disrupted or modified.

15. The cell according to claim 10, in which the HLA-A allele and the HLA-B allele are disrupted and at least one kind of HLA-C protein can be expressed.

16. The cell according to claim 15, wherein the HLA-C protein is a protein encoded by one kind of allele selected from the group consisting of an HLA-C*01:02 allele, an HLA-C*02:02 allele, an HLA-C*03:03 allele, an HLA-C*03:04 allele, an HLA-C*04:01 allele, an HLA-C*05:01 allele, an HLA-C*06:02 allele, an HLA-C*07:01 allele, an HLA-C*07:02 allele, an HLA-C*08:01 allele, an HLA-C*12:02 allele, and an HLA-C*16:01 allele.

17. (canceled)

18. (canceled)

19. (canceled)

20. (canceled)

21. A gRNA targeting, as a target base sequence, a base sequence that is mapped to only one target HLA haplotype in a case where the base sequence is mapped to base sequence data of genomic DNA of all HLA haplotypes, but that is not mapped in a case where the base sequence is mapped to base sequence data of all genomic DNA except for HLA alleles.

22. The gRNA according to claim 21,
wherein the target base sequence consists of
a base sequence set forth in any of SEQ ID NOs: 3, 4, 7, 45 to 52, and 72 to 2459, or
a base sequence in which one or several bases are deleted, substituted, or added at a 5′ end of a base sequence set forth in any of SEQ ID NOs: 3, 4, 7, 45 to 52, and 72 to 2459.

23. The gRNA according to claim 21,
wherein the target base sequence consists of
a base sequence set forth in any of SEQ ID NOs: 3, 4, 7, and 45 to 52, or
a base sequence in which one or several bases are deleted, substituted, or added at a 5′ end of a base sequence set forth in any of SEQ ID NOs: 3, 4, 7, and 45 to 52.

24. The gRNA according to claim 21, wherein the target base sequence is mapped to an exon 2 or 3 of an HLA gene.

25. (canceled)

26. (canceled)

27. (canceled)

28. (canceled)

29. (canceled)

30. (canceled)

31. The method for producing according to claim 1, wherein the donor cell homozygously has the HLA allele that is present in the donor cell but is not present in the recipient.

32. The cell according to claim 10, wherein the disrupted or modified HLA allele is homozygous.
